(19) United States
(12) Patent Application Publication
(10) Pub. No.: US 2024/0052436 A1
(43) Pub. Date: Feb. 15, 2024

(54) CRISPR-BASED SARS-COV-2 DETECTION

(71) Applicant: SHERLOCK BIOSCIENCES, Brighton, MA (US)

(72) Inventors: Xiang Li, Malden, MA (US); Mary Katherine Wilson, Burlington, MA (US); Christine Marie Coticchia, Brookline, MA (US); Brendan John Manning, Brighton, MA (US); William Jeremy Blake, Winchester, MA (US); Elizabeth Mae Selleck Fiore, Brighton, MA (US)

(21) Appl. No.: 18/009,832

(22) PCT Filed: Jun. 11, 2021
(86) PCT No.: PCT/US21/36925

§ 371 Date: Dec. 12, 2022

Related U.S. Application Data
(60) Provisional application No. 63/185,268, filed on May 6, 2021.
(60) Provisional application No. 63/139,268, filed on Jan. 19, 2021.
(60) Provisional application No. 63/068,817, filed on Aug. 21, 2020.
(60) Provisional application No. 63/056,523, filed on Jul. 24, 2020.
(60) Provisional application No. 63/054,214, filed on Jul. 20, 2020.
(60) Provisional application No. 63/038,715, filed on Jun. 12, 2020.

(51) Int. Cl. C12Q 1/70

(52) U.S. Cl. CPC C12Q 1/701; C12Q 2600/16

(57) ABSTRACT

The present disclosure provides methods and compositions for the detection of SARS-CoV-2 by CRISPR/Cas collateral RNAse activity.

### CROSS REFERENCE TO RELATED APPLICATIONS

[0001] This application claims priority to each of U.S. Provisional Patent Application Nos. 63/038,715 filed Jun. 12, 2020; 63/054,214 filed Jul. 20, 2020; 63/056,523 filed Jul. 24, 2020; 63/068,817 filed Aug. 21, 2020; 63/139,268 filed Jan. 19, 2021; 63/185,268 filed May 6, 2021 the entire contents of each of which are hereby incorporated by reference.

### BACKGROUND

[0002] SARS-CoV-2, first identified in humans in December 2019, causes coronavirus disease 2019 (COVID-19), and was declared a global pandemic by the World Health Organization on Mar. 11, 2020. The hallmark of productive public health management of any and all outbreaks is the ability to test for individuals to identify their infection status. There is a present desperate need for improved detection and diagnostic technologies.

### SUMMARY

[0003] The present disclosure provides compositions and methods for the detection and diagnosis of SARS-CoV-2.

### BRIEF DESCRIPTION OF DRAWING

[0004] FIG. 1 presents open reading frames of SARS-CoV-2; SARS-CoV; and MERS-CoV.

[0005] FIG. 2 provides an exemplary workflow for detection of SARS-CoV-2 described herein.

[0006] FIG. 3: Plotted means of three replicates (n=3) of sample detection of 30 cp/μL of target 1 (orf1ab) and 6 cp/μL of target 2 (N), along with positive (5000 cp/μL) and negative controls (0 cp/μL).

[0007] FIG. 4: Signal-to-background ratio linear scale plot at 15 minutes (T15/T0) of individual replicates for target 1 (orf1ab) and target 2 (N).

[0008] FIG. 5: Signal-to-background ratio linear scale plot at 10 minutes (T10/T0) of individual replicates for target 1 (orf1ab) and target 2 (N).

[0009] FIG. 6: Signal-to-background ratio log scale plot at 15 minutes (T15/T0) of individual replicates for target 1 (orf1ab) and target 2 (N).

[0010] FIG. 7: Signal-to-background ratio log scale plot at 10 minutes (T10/T0) of individual replicates for target 1 (orf1ab) and target 2 (N).

[0011] FIG. 8: Plotted means of twenty replicates (n=20) of sample detection of 45 cp/μL of target 1 (orf1ab) and 9 cp/μL of target 2 (N), along with positive (5000 cp/μL) and negative controls (0 cp/μL).

[0012] FIG. 9: Signal-to-background ratio log scale plot at 15 minutes (T15/T0) of individual replicates target 1 (orf1ab) and target 2 (N). Results are considered to be negative if the S:B ratio for the sample is <5.0.

[0013] FIG. 10: Signal-to-background ratio log scale plot at 10 minutes (T10/T0) of individual replicates for target 1 (orf1ab) and target 2 (N). Results are considered to be negative if the S:B ratio for the sample is <5.0.

[0014] FIG. 11 shows an exemplary workflow of a combined workflow as described herein.

[0015] FIG. 12 shows results of detecting SARS-CoV-2 (N and Orf1ab (“O”) using a combined “automated” workflow as described herein.

[0016] FIG. 13 shows a comparison of RFUs of the combined workflow relative to a standard workflow.

[0017] FIG. 14 shows a comparison of SARS-CoV-2 containing saliva samples extracted using methods described herein and assayed using the combined workflow (“new workflow”).

[0018] FIG. 15 further demonstrates the sensitivity of detection using SARS-CoV-2 containing saliva samples extracted using methods described herein and assayed using the combined workflow.

[0019] FIG. 16 demonstrates the ability of the duplexed system (DARTSv1) to detect both SARS-CoV-2 and RP simultaneously.

[0020] FIG. 17 shows evaluation of the limit of detection of DARTSv1.

[0021] FIG. 18 demonstrates the ability of the duplexed system (DARTSv2) to detect both SARS-CoV-2 and RP simultaneously.

[0022] FIG. 19 shows evaluation of the limit of detection of DARTSv2.

[0023] FIG. 20 shows concordance of DARTSv2 with PCR SARS-CoV-2 detection results on unextracted NP swab clinical samples.

[0024] FIG. 21 shows concordance of DARTSv2 with PCR SARS-CoV-2 detection results on extracted clinical samples.

### DEFINITIONS

[0025] About: The term “about”, when used herein in reference to a value, refers to a value that is similar, in context to the referenced value. In general, those skilled in the art, familiar with the context, will appreciate the relevant degree of variance encompassed by “about” in that context. For example, in some embodiments, the term “about” may encompass a range of values that within 25%, 20%, 19%, 18%, 17%, 16%, 15%, 14%, 13%, 12%, 11%, 10%, 9%, 8%, 7%, 6%, 5%, 4%, 3%, 2%, 1%, or less of the referred value.

[0026] Agent: In general, the term “agent”, as used herein, is used to refer to an entity (e.g., for example, a lipid, metal, nucleic acid, polypeptide, polysaccharide, small molecule, etc, or complex, combination, mixture or system [e.g., cell, tissue, organism] thereof), or phenomenon (e.g., heat, electric current or field, magnetic force or field, etc). In appropriate circumstances, as will be clear from context to those skilled in the art, the term may be utilized to refer to an entity that is or comprises a cell or organism, or a fraction, extract, or component thereof. Alternatively or additionally, as context will make clear, the term may be used to refer to a natural product in that it is found in and/or is obtained from nature. In some instances, again as will be clear from context, the term may be used to refer to one or more entities that is man-made in that it is designed, engineered, and/or produced through action of the hand of man and/or is not found in nature. In some embodiments, an agent may be utilized in isolated or pure form; in some embodiments, an agent may be utilized in crude form. In some embodiments, potential agents may be provided as collections or libraries, for example that may be screened to identify or characterize active agents within them. In some cases, the term “agent” may refer to a compound or entity that is or comprises a polymer; in some cases, the term may refer to a compound or entity that comprises one or more polymeric moieties. In some embodiments, the term “agent” may refer to a compound or entity that is not a polymer and/or is substantially free of any polymer and/or of one or more particular polymeric moieties. In some embodiments, the term may refer to a compound or entity that lacks or is substantially free of any polymeric moiety.

[0027] Amino acid: in its broadest sense, as used herein, refers to any compound and/or substance that can be incorporated into a polypeptide chain, e.g., through formation of one or more peptide bonds. In some embodiments, an amino acid has the general structure H₂N—C(H)(R)—COOH. In some embodiments, an amino acid is a naturally-occurring amino acid. In some embodiments, an amino acid is a non-natural amino acid; in some embodiments, an amino acid is a D-amino acid; in some embodiments, an amino acid is an L-amino acid. “Standard amino acid” refers to any of the twenty standard L-amino acids commonly found in naturally occurring peptides. “Nonstandard amino acid” refers to any amino acid, other than the standard amino acids, regardless of whether it is prepared synthetically or obtained from a natural source. In some embodiments, an amino acid, including a carboxy- and/or amino-terminal amino acid in a polypeptide, can contain a structural modification as compared with the general structure above. For example, in some embodiments, an amino acid may be modified by methylation, amidation, acetylation, pegylation, glycosylation, phosphorylation, and/or substitution (e.g., of the amino group, the carboxylic acid group, one or more protons, and/or the hydroxyl group) as compared with the general structure. In some embodiments, such modification may, for example, alter the circulating half-life of a polypeptide containing the modified amino acid as compared with one containing an otherwise identical unmodified amino acid. In some embodiments, such modification does not significantly alter a relevant activity of a polypeptide containing the modified amino acid, as compared with one containing an otherwise identical unmodified amino acid. As will be clear from context, in some embodiments, the term “amino acid” may be used to refer to a free amino acid; in some embodiments it may be used to refer to an amino acid residue of a polypeptide.

[0028] Approximately: As used herein, the term “approximately” or “about,” as applied to one or more values of interest, refers to a value that is similar to a stated reference value. In certain embodiments, the term “approximately” or “about” refers to a range of values that fall within 25%, 20%, 19%, 18%, 17%, 16%, 15%, 14%, 13%, 12%, 11%, 10%, 9%, 8%, 7%, 6%, 5%, 4%, 3%, 2%, 1%, or less in either direction (greater than or less than) of the stated reference value unless otherwise stated or otherwise evident from the context (except where such number would exceed 100% of a possible value).

[0029] Associated: Two events or entities are “associated” with one another, as that term is used herein, if the presence, level, degree, type and/or form of one is correlated with that of the other. For example, a particular entity (e.g., polypeptide, genetic signature, metabolite, microbe, etc) is considered to be associated with a particular disease, disorder, or condition, if its presence, level and/or form correlates with incidence of and/or susceptibility to the disease, disorder, or condition (e.g., across a relevant population). In some embodiments, two or more entities are physically “associated” with one another if they interact, directly or indirectly, so that they are and/or remain in physical proximity with one another. In some embodiments, two or more entities that are physically associated with one another are covalently linked to one another; in some embodiments, two or more entities that are physically associated with one another are not covalently linked to one another but are non-covalently associated, for example by means of hydrogen bonds, van der Waals interaction, hydrophobic interactions, magnetism, and combinations thereof.

[0030] Binding: It will be understood that the term “binding”, as used herein, typically refers to a non-covalent association between or among two or more entities. “Direct” binding involves physical contact between entities or moieties; indirect binding involves physical interaction by way of physical contact with one or more intermediate entities. Binding between two or more entities can typically be assessed in any of a variety of contexts—including where interacting entities or moieties are studied in isolation or in the context of more complex systems (e.g., while covalently or otherwise associated with a carrier entity and/or in a biological system or cell).

[0031] Biological Sample: As used herein, the term “biological sample” typically refers to a sample obtained or derived from a biological source (e.g., a tissue or organism or cell culture) of interest, as described herein. In some embodiments, a source of interest is or comprises an organism, such as an animal or human. In some embodiments, a biological sample is or comprises biological tissue or fluid. In some embodiments, a biological sample may be or comprise bone marrow; blood; blood cells; ascites; tissue or fine needle biopsy samples; cell-containing body fluids; free floating nucleic acids; sputum; saliva; urine; cerebrospinal fluid, peritoneal fluid; pleural fluid; feces; lymph; gynecological fluids; skin swabs; vaginal swabs; oral swabs; nasal swabs; washings or lavages such as a ductal lavages or broncheoalveolar lavages; aspirates; scrapings; bone marrow specimens; tissue biopsy specimens; surgical specimens; feces, other body fluids, secretions, and/or excretions; and/or cells therefrom, etc. In some embodiments, a biological sample is or comprises cells obtained from an individual. In some embodiments, obtained cells are or include cells from an individual from whom the sample is obtained. In some embodiments, a sample is a “primary sample” obtained directly from a source of interest by any appropriate means. For example, in some embodiments, a primary biological sample is obtained by methods selected from the group consisting of biopsy (e.g., fine needle aspiration or tissue biopsy), surgery, collection of body fluid (e.g., blood, lymph, feces etc.), etc. In some embodiments, as will be clear from context, the term “sample” refers to a preparation that is obtained by processing (e.g., by removing one or more components of and/or by adding one or more agents to) a primary sample. For example, filtering using a semi-permeable membrane. Such a “processed sample” may comprise, for example nucleic acids or proteins extracted from a sample or obtained by subjecting a primary sample to techniques such as amplification or reverse transcription of mRNA, isolation and/or purification of certain components, etc.

[0032] Cellular lysate: As used herein, the term “cellular lysate” or “cell lysate” refers to a fluid containing contents of one or more disrupted cells (i.e., cells whose membrane has been disrupted). In some embodiments, a cellular lysate includes both hydrophilic and hydrophobic cellular components. In some embodiments, a cellular lysate includes predominantly hydrophilic components; in some embodiments, a cellular lysate includes predominantly hydrophobic components. In some embodiments, a cellular lysate is a lysate of one or more cells selected from the group consisting of plant cells, microbial (e.g., bacterial or fungal) cells, animal cells (e.g., mammalian cells), human cells, and combinations thereof. In some embodiments, a cellular lysate is a lysate of one or more abnormal cells, such as cancer cells. In some embodiments, a cellular lysate is a crude lysate in that little or no purification is performed after disruption of the cells; in some embodiments, such a lysate is referred to as a “primary” lysate. In some embodiments, one or more isolation or purification steps is performed on a primary lysate; however, the term “lysate” refers to a preparation that includes multiple cellular components and not to pure preparations of any individual component.

[0033] Composition: Those skilled in the art will appreciate that the term “composition”, as used herein, may be used to refer to a discrete physical entity that comprises one or more specified components. In general, unless otherwise specified, a composition may be of any form—e.g., gas, gel, liquid, solid, etc.

[0034] Comprising: A composition or method described herein as “comprising” one or more named elements or steps is open-ended, meaning that the named elements or steps are essential, but other elements or steps may be added within the scope of the composition or method. To avoid prolixity, it is also understood that any composition or method described as “comprising” (or which “comprises”) one or more named elements or steps also describes the corresponding, more limited composition or method “consisting essentially of” (or which “consists essentially of”) the same named elements or steps, meaning that the composition or method includes the named essential elements or steps and may also include additional elements or steps that do not materially affect the basic and novel characteristic(s) of the composition or method. It is also understood that any composition or method described herein as “comprising” or “consisting essentially of” one or more named elements or steps also describes the corresponding, more limited, and closed-ended composition or method “consisting of” (or “consists of”) the named elements or steps to the exclusion of any other unnamed element or step. In any composition or method disclosed herein, known or disclosed equivalents of any named essential element or step may be substituted for that element or step.

[0035] Corresponding to: As used herein, the term “corresponding to” may be used to designate the position/identity of a structural element in a compound or composition through comparison with an appropriate reference compound or composition. For example, in some embodiments, a monomeric residue in a polymer (e.g., an amino acid residue in a polypeptide or a nucleic acid residue in a polynucleotide) may be identified as “corresponding to” a residue in an appropriate reference polymer. For example, those of ordinary skill will appreciate that, for purposes of simplicity, residues in a polypeptide are often designated using a canonical numbering system based on a reference related polypeptide, so that an amino acid “corresponding to” a residue at position 190, for example, need not actually be the 190^{th} amino acid in a particular amino acid chain but rather corresponds to the residue found at 190 in the reference polypeptide; those of ordinary skill in the art readily appreciate how to identify “corresponding” amino acids. For example, those skilled in the art will be aware of various sequence alignment strategies, including software programs such as, for example, BLAST, CS-BLAST, CUSASW++, DIAMOND, FASTA, GGSEARCH/GLSEARCH, Genoogle, HMMER, HHpred/HHsearch, IDF, Infernal, KLAST, USEARCH, parasail, PSI-BLAST, PSI-Search, ScalaBLAST, Sequilab, SAM, SSEARCH, SWAPHI, SWAPHI-LS, SWIMM, or SWIPE that can be utilized, for example, to identify “corresponding” residues in polypeptides and/or nucleic acids in accordance with the present disclosure.

[0036] Designed: As used herein, the term “designed” refers to an agent (i) whose structure is or was selected by the hand of man; (ii) that is produced by a process requiring the hand of man; and/or (iii) that is distinct from natural substances and other known agents.

[0037] Detectable entity: The term “detectable entity” as used herein refers to any element, molecule, functional group, compound, fragment or moiety that is detectable. In some embodiments, a detectable entity is provided or utilized alone. In some embodiments, a detectable entity is provided and/or utilized in association with (e.g., joined to) another agent. Examples of detectable entities include, but are not limited to: various ligands, radionuclides (e.g., ³H, ¹⁴C, ¹⁸F, ¹⁹F, ³²P, ³⁵S, ¹³⁵I, ¹²⁵I, ¹²³I, ⁶⁴Cu, ¹⁸⁷Re, ¹¹¹In, ⁹⁰Y, ^{99m}Tc, ¹⁷⁷Lu, ⁸⁹Zr etc.), fluorescent dyes (for specific exemplary fluorescent dyes, see below), chemiluminescent agents (such as, for example, acridinum esters, stabilized dioxetanes, and the like), bioluminescent agents, spectrally resolvable inorganic fluorescent semiconductors nanocrystals (i.e., quantum dots), metal nanoparticles (e.g., gold, silver, copper, platinum, etc.) nanoclusters, paramagnetic metal ions, enzymes (for specific examples of enzymes, see below), colorimetric labels (such as, for example, dyes, colloidal gold, and the like), biotin, dioxigenin, haptens, and proteins for which antisera or monoclonal antibodies are available.

[0038] Determine: Many methodologies described herein include a step of “determining”. Those of ordinary skill in the art, reading the present specification, will appreciate that such “determining” can utilize or be accomplished through use of any of a variety of techniques available to those skilled in the art, including for example specific techniques explicitly referred to herein. In some embodiments, determining involves manipulation of a physical sample. In some embodiments, determining involves consideration and/or manipulation of data or information, for example utilizing a computer or other processing unit adapted to perform a relevant analysis. In some embodiments, determining involves receiving relevant information and/or materials from a source. In some embodiments, determining involves comparing one or more features of a sample or entity to a comparable reference.

[0039] Expression: As used herein, “expression” of a nucleic acid sequence refers to one or more of the following events: (1) production of an RNA template from a DNA sequence (e.g., by transcription); (2) processing of an RNA transcript (e.g., by splicing, editing, 5′ cap formation, and/or 3′ end formation); (3) translation of an RNA into a polypeptide or protein; and/or (4) post-translational modification of a polypeptide or protein.

[0040] Gel: As used herein, the term “gel” refers to viscoelastic materials whose rheological properties distinguish them from solutions, solids, etc. In some embodiments, a composition is considered to be a gel if its storage modulus (G′) is larger than its modulus (G″). In some embodiments, a composition is considered to be a gel if there are chemical or physical cross-linked networks in solution, which is distinguished from entangled molecules in viscous solution.

[0041] Homology: As used herein, the term “homology” refers to the overall relatedness between polymeric molecules, e.g., between polypeptide molecules. In some embodiments, polymeric molecules such as antibodies are considered to be “homologous” to one another if their sequences are at least 80%, 85%, 90%, 95%, or 99% identical. In some embodiments, polymeric molecules are considered to be “homologous” to one another if their sequences are at least 80%, 85%, 90%, 95%, or 99% similar.

[0042] Identity: As used herein, the term “identity” refers to the overall relatedness between polymeric molecules, e.g., between nucleic acid molecules (e.g., DNA molecules and/or RNA molecules) and/or between polypeptide molecules. In some embodiments, polymeric molecules are considered to be “substantially identical” to one another if their sequences are at least 25%, 30%, 35%, 40%, 45%, 50%, 55%, 60%, 65%, 70%, 75%, 80%, 85%, 90%, 95%, or 99% identical. Calculation of the percent identity of two nucleic acid or polypeptide sequences, for example, can be performed by aligning the two sequences for optimal comparison purposes (e.g., gaps can be introduced in one or both of a first and a second sequences for optimal alignment and non-identical sequences can be disregarded for comparison purposes). In certain embodiments, the length of a sequence aligned for comparison purposes is at least 30%, at least 40%, at least 50%, at least 60%, at least 70%, at least 80%, at least 90%, at least 95%, or substantially 100% of the length of a reference sequence. The nucleotides at corresponding positions are then compared. When a position in the first sequence is occupied by the same residue (e.g., nucleotide or amino acid) as the corresponding position in the second sequence, then the molecules are identical at that position. The percent identity between the two sequences is a function of the number of identical positions shared by the sequences, taking into account the number of gaps, and the length of each gap, which needs to be introduced for optimal alignment of the two sequences. The comparison of sequences and determination of percent identity between two sequences can be accomplished using a mathematical algorithm. For example, the percent identity between two nucleotide sequences can be determined using the algorithm of Meyers and Miller (CABIOS, 1989, 4: 11-17), which has been incorporated into the ALIGN program (version 2.0). In some exemplary embodiments, nucleic acid sequence comparisons made with the ALIGN program use a PAM120 weight residue table, a gap length penalty of 12 and a gap penalty of 4. The percent identity between two nucleotide sequences can, alternatively, be determined using the GAP program in the GCG software package using an NWSgapdna.CMP matrix.

[0043] In vitro: The term “in vitro” as used herein refers to events that occur in an artificial environment, e.g., in a test tube or reaction vessel, in cell culture, etc., rather than within a multi-cellular organism.

[0044] Isolated: as used herein, refers to a substance and/or entity that has been (1) separated from at least some of the components with which it was associated when initially produced (whether in nature and/or in an experimental setting), and/or (2) designed, produced, prepared, and/or manufactured by the hand of man. Isolated substances and/or entities may be separated from about 10%, about 20%, about 30%, about 40%, about 50%, about 60%, about 70%, about 80%, about 90%, about 91%, about 92%, about 93%, about 94%, about 95%, about 96%, about 97%, about 98%, about 99%, or more than about 99% of the other components with which they were initially associated. In some embodiments, isolated agents are about 80%, about 85%, about 90%, about 91%, about 92%, about 93%, about 94%, about 95%, about 96%, about 97%, about 98%, about 99%, or more than about 99% pure. As used herein, a substance is “pure” if it is substantially free of other components. In some embodiments, as will be understood by those skilled in the art, a substance may still be considered “isolated” or even “pure”, after having been combined with certain other components such as, for example, one or more carriers or excipients (e.g., buffer, solvent, water, etc.); in such embodiments, percent isolation or purity of the substance is calculated without including such carriers or excipients. To give but one example, in some embodiments, a biological polymer such as a polypeptide or polynucleotide that occurs in nature is considered to be “isolated” when, a) by virtue of its origin or source of derivation is not associated with some or all of the components that accompany it in its native state in nature; b) it is substantially free of other polypeptides or nucleic acids of the same species from the species that produces it in nature; c) is expressed by or is otherwise in association with components from a cell or other expression system that is not of the species that produces it in nature. Thus, for instance, in some embodiments, a polypeptide that is chemically synthesized or is synthesized in a cellular system different from that which produces it in nature is considered to be an “isolated” polypeptide. Alternatively or additionally, in some embodiments, a polypeptide that has been subjected to one or more purification techniques may be considered to be an “isolated” polypeptide to the extent that it has been separated from other components a) with which it is associated in nature; and/or b) with which it was associated when initially produced.

[0045] Nucleic acid: As used herein, in its broadest sense, refers to any compound and/or substance that is or can be incorporated into an oligonucleotide chain. In some embodiments, a nucleic acid is a compound and/or substance that is or can be incorporated into an oligonucleotide chain via a phosphodiester linkage. As will be clear from context, in some embodiments, “nucleic acid” refers to an individual nucleic acid residue (e.g., a nucleotide and/or nucleoside); in some embodiments, “nucleic acid” refers to an oligonucleotide chain comprising individual nucleic acid residues. In some embodiments, a “nucleic acid” is or comprises RNA; in some embodiments, a “nucleic acid” is or comprises DNA. In some embodiments, a nucleic acid is, comprises, or consists of one or more natural nucleic acid residues. In some embodiments, a nucleic acid is, comprises, or consists of one or more nucleic acid analogs. In some embodiments, a nucleic acid analog differs from a nucleic acid in that it does not utilize a phosphodiester backbone. For example, in some embodiments, a nucleic acid is, comprises, or consists of one or more “peptide nucleic acids”, which are known in the art and have peptide bonds instead of phosphodiester bonds in the backbone, are considered within the scope of the present invention. Alternatively or additionally, in some embodiments, a nucleic acid has one or more phosphorothioate and/or 5′-N-phosphoramidite linkages rather than phosphodiester bonds. In some embodiments, a nucleic acid is, comprises, or consists of one or more natural nucleosides (e.g., adenosine, thymidine, guanosine, cytidine, uridine, deoxyadenosine, deoxythymidine, deoxy guanosine, and deoxycytidine). In some embodiments, a nucleic acid is, comprises, or consists of one or more nucleoside analogs (e.g., 2-aminoadenosine, 2-thiothymidine, inosine, pyrrolo-pyrimidine, 3-methyl adenosine, 5-methylcytidine, C-5 propynyl-cytidine, C-5 propynyl-uridine, 2-aminoadenosine, C5-bromouridine, C5-fluorouridine, C5-iodouridine, C5-propynyl-uridine, C5-propynyl-cytidine, C5-methylcytidine, 2-aminoadenosine, 7-deazaadenosine, 7-deazaguanosine, 8-oxoadenosine, 8-oxoguanosine, 0(6)-methylguanine, 2-thiocytidine, methylated bases, intercalated bases, and combinations thereof). In some embodiments, a nucleic acid comprises one or more modified sugars (e.g., 2′-fluororibose, ribose, 2′-deoxyribose, arabinose, and hexose) as compared with those in natural nucleic acids. In some embodiments, a nucleic acid has a nucleotide sequence that encodes a functional gene product such as an RNA or protein. In some embodiments, a nucleic acid includes one or more introns. In some embodiments, nucleic acids are prepared by one or more of isolation from a natural source, enzymatic synthesis by polymerization based on a complementary template (in vivo or in vitro), reproduction in a recombinant cell or system, and chemical synthesis. In some embodiments, a nucleic acid is at least 3, 4, 5, 6, 7, 8, 9, 10, 15, 20, 25, 30, 35, 40, 45, 50, 55, 60, 65, 70, 75, 80, 85, 90, 95, 100, 110, 120, 130, 140, 150, 160, 170, 180, 190, 20, 225, 250, 275, 300, 325, 350, 375, 400, 425, 450, 475, 500, 600, 700, 800, 900, 1000, 1500, 2000, 2500, 3000, 3500, 4000, 4500, 5000 or more residues long. In some embodiments, a nucleic acid is partly or wholly single stranded; in some embodiments, a nucleic acid is partly or wholly double stranded. In some embodiments a nucleic acid has a nucleotide sequence comprising at least one element that encodes, or is the complement of a sequence that encodes, a polypeptide. In some embodiments, a nucleic acid has enzymatic activity.

[0046] Polypeptide: As used herein refers to any polymeric chain of amino acids. In some embodiments, a polypeptide has an amino acid sequence that occurs in nature. In some embodiments, a polypeptide has an amino acid sequence that does not occur in nature. In some embodiments, a polypeptide has an amino acid sequence that is engineered in that it is designed and/or produced through action of the hand of man. In some embodiments, a polypeptide may comprise or consist of natural amino acids, non-natural amino acids, or both. In some embodiments, a polypeptide may comprise or consist of only natural amino acids or only non-natural amino acids. In some embodiments, a polypeptide may comprise D-amino acids, L-amino acids, or both. In some embodiments, a polypeptide may comprise only D-amino acids. In some embodiments, a polypeptide may comprise only L-amino acids. In some embodiments, a polypeptide may include one or more pendant groups or other modifications, e.g., modifying or attached to one or more amino acid side chains, at the polypeptide's N-terminus, at the polypeptide's C-terminus, or any combination thereof. In some embodiments, such pendant groups or modifications may be selected from the group consisting of acetylation, amidation, lipidation, methylation, pegylation, etc., including combinations thereof. In some embodiments, a polypeptide may be cyclic, and/or may comprise a cyclic portion. In some embodiments, a polypeptide is not cyclic and/or does not comprise any cyclic portion. In some embodiments, a polypeptide is linear. In some embodiments, a polypeptide may be or comprise a stapled polypeptide. In some embodiments, the term “polypeptide” may be appended to a name of a reference polypeptide, activity, or structure; in such instances it is used herein to refer to polypeptides that share the relevant activity or structure and thus can be considered to be members of the same class or family of polypeptides. For each such class, the present specification provides and/or those skilled in the art will be aware of exemplary polypeptides within the class whose amino acid sequences and/or functions are known; in some embodiments, such exemplary polypeptides are reference polypeptides for the polypeptide class or family. In some embodiments, a member of a polypeptide class or family shows significant sequence homology or identity with, shares a common sequence motif (e.g., a characteristic sequence element) with, and/or shares a common activity (in some embodiments at a comparable level or within a designated range) with a reference polypeptide of the class; in some embodiments with all polypeptides within the class). For example, in some embodiments, a member polypeptide shows an overall degree of sequence homology or identity with a reference polypeptide that is at least about 30-40%, and is often greater than about 50%, 60%, 70%, 80%, 90%, 91%, 92%, 93%, 94%, 95%, 96%, 97%, 98%, 99% or more and/or includes at least one region (e.g., a conserved region that may in some embodiments be or comprise a characteristic sequence element) that shows very high sequence identity, often greater than 90% or even 95%, 96%, 97%, 98%, or 99%. Such a conserved region usually encompasses at least 3-4 and often up to 20 or more amino acids; in some embodiments, a conserved region encompasses at least one stretch of at least 2, 3, 4, 5, 6, 7, 8, 9, 10, 11, 12, 13, 14, 15 or more contiguous amino acids. In some embodiments, a relevant polypeptide may comprise or consist of a fragment of a parent polypeptide. In some embodiments, a useful polypeptide as may comprise or consist of a plurality of fragments, each of which is found in the same parent polypeptide in a different spatial arrangement relative to one another than is found in the polypeptide of interest (e.g., fragments that are directly linked in the parent may be spatially separated in the polypeptide of interest or vice versa, and/or fragments may be present in a different order in the polypeptide of interest than in the parent), so that the polypeptide of interest is a derivative of its parent polypeptide.

[0047] Protein: As used herein, the term “protein” refers to a polypeptide (i.e., a string of at least two amino acids linked to one another by peptide bonds). Proteins may include moieties other than amino acids (e.g., may be glycoproteins, proteoglycans, etc.) and/or may be otherwise processed or modified. Those of ordinary skill in the art will appreciate that a “protein” can be a complete polypeptide chain as produced by a cell (with or without a signal sequence), or can be a characteristic portion thereof. Those of ordinary skill will appreciate that a protein can sometimes include more than one polypeptide chain, for example linked by one or more disulfide bonds or associated by other means. Polypeptides may contain L-amino acids, D-amino acids, or both and may contain any of a variety of amino acid modifications or analogs known in the art. Useful modifications include, e.g., terminal acetylation, amidation, methylation, etc. In some embodiments, proteins may comprise natural amino acids, non-natural amino acids, synthetic amino acids, and combinations thereof. The term “peptide” is generally used to refer to a polypeptide having a length of less than about 100 amino acids, less than about 50 amino acids, less than 20 amino acids, or less than 10 amino acids. In some embodiments, proteins are antibodies, antibody fragments, biologically active portions thereof, and/or characteristic portions thereof.

[0048] Reference: As used herein describes a standard or control relative to which a comparison is performed. For example, in some embodiments, an agent, animal, individual, population, sample, sequence or value of interest is compared with a reference or control agent, animal, individual, population, sample, sequence or value. In some embodiments, a reference or control is tested and/or determined substantially simultaneously with the testing or determination of interest. In some embodiments, a reference or control is a historical reference or control, optionally embodied in a tangible medium. Typically, as would be understood by those skilled in the art, a reference or control is determined or characterized under comparable conditions or circumstances to those under assessment. Those skilled in the art will appreciate when sufficient similarities are present to justify reliance on and/or comparison to a particular possible reference or control.

[0049] Sample: As used herein, the term “sample” typically refers to an aliquot of material obtained or derived from a source of interest, as described herein. In some embodiments, a source of interest is a biological or environmental source. In some embodiments, a source of interest may be or comprise a cell or an organism, such as a microbe, a plant, or an animal (e.g., a human). In some embodiments, a source of interest is or comprises biological tissue or fluid. In some embodiments, a biological tissue or fluid may be or comprise amniotic fluid, aqueous humor, ascites, bile, bone marrow, blood, breast milk, cerebrospinal fluid, cerumen, chyle, chime, ejaculate, endolymph, exudate, feces, gastric acid, gastric juice, lymph, mucus, pericardial fluid, perilymph, peritoneal fluid, pleural fluid, pus, rheum, saliva, sebum, semen, serum, smegma, sputum, synovial fluid, sweat, tears, urine, vaginal secreations, vitreous humour, vomit, and/or combinations or component(s) thereof. In some embodiments, a biological fluid may be or comprise an intracellular fluid, an extracellular fluid, an intravascular fluid (blood plasma), an interstitial fluid, a lymphatic fluid, and/or a transcellular fluid. In some embodiments, a biological fluid may be or comprise a plant exudate. In some embodiments, a biological tissue or sample may be obtained, for example, by aspirate, biopsy (e.g., fine needle or tissue biopsy), swab (e.g., oral, nasal, skin, or vaginal swab), scraping, surgery, washing or lavage (e.g., brocheoalvealar, ductal, nasal, ocular, oral, uterine, vaginal, or other washing or lavage). In some embodiments, a biological sample is or comprises cells obtained from an individual. In some embodiments, a sample is a “primary sample” obtained directly from a source of interest by any appropriate means. In some embodiments, as will be clear from context, the term “sample” refers to a preparation that is obtained by processing (e.g., by removing one or more components of and/or by adding one or more agents to) a primary sample. For example, filtering using a semi-permeable membrane. Such a “processed sample” may comprise, for example nucleic acids or proteins extracted from a sample or obtained by subjecting a primary sample to one or more techniques such as amplification or reverse transcription of nucleic acid, isolation and/or purification of certain components, etc.

[0050] Specific: The term “specific”, when used herein with reference to an agent having an activity, is understood by those skilled in the art to mean that the agent discriminates between potential target entities or states. For example, an in some embodiments, an agent is said to bind “specifically” to its target if it binds preferentially with that target in the presence of one or more competing alternative targets. In many embodiments, specific interaction is dependent upon the presence of a particular structural feature of the target entity (e.g., an epitope, a cleft, a binding site). It is to be understood that specificity need not be absolute. In some embodiments, specificity may be evaluated relative to that of the binding agent for one or more other potential target entities (e.g., competitors). In some embodiments, specificity is evaluated relative to that of a reference specific binding agent. In some embodiments specificity is evaluated relative to that of a reference non-specific binding agent. In some embodiments, the agent or entity does not detectably bind to the competing alternative target under conditions of binding to its target entity. In some embodiments, binding agent binds with higher on-rate, lower off-rate, increased affinity, decreased dissociation, and/or increased stability to its target entity as compared with the competing alternative target(s).

[0051] Specificity: As is known in the art, “specificity” is a measure of the ability of a particular ligand to distinguish its binding partner from other potential binding partners.

[0052] Subject: As used herein, the term “subject” refers to an organism, for example, a mammal (e.g., a human, a non-human mammal, a non-human primate, a primate, a laboratory animal, a mouse, a rat, a hamster, a gerbil, a cat, a dog). In some embodiments a human subject is an adult, adolescent, or pediatric subject. In some embodiments, a subject is suffering from a disease, disorder or condition, e.g., a disease, disorder or condition that can be treated as provided herein, e.g., a cancer or a tumor listed herein. In some embodiments, a subject is susceptible to a disease, disorder, or condition; in some embodiments, a susceptible subject is predisposed to and/or shows an increased risk (as compared to the average risk observed in a reference subject or population) of developing the disease, disorder or condition. In some embodiments, a subject displays one or more symptoms of a disease, disorder or condition. In some embodiments, a subject does not display a particular symptom (e.g, clinical manifestation of disease) or characteristic of a disease, disorder, or condition. In some embodiments, a subject does not display any symptom or characteristic of a disease, disorder, or condition. In some embodiments, a subject is a patient. In some embodiments, a subject is an individual to whom diagnosis and/or therapy is and/or has been administered.

[0053] Suffering from: An individual who is “suffering from” a disease, disorder, and/or condition displays one or more symptoms of a disease, disorder, and/or condition and/or has been diagnosed with the disease, disorder, or condition.

[0054] Susceptible to: An individual who is “susceptible to” a disease, disorder, and/or condition is one who has a higher risk of developing the disease, disorder, and/or condition than does a member of the general public. In some embodiments, an individual who is susceptible to a disease, disorder and/or condition may not have been diagnosed with the disease, disorder, and/or condition. In some embodiments, an individual who is susceptible to a disease, disorder, and/or condition may exhibit symptoms of the disease, disorder, and/or condition. In some embodiments, an individual who is susceptible to a disease, disorder, and/or condition may not exhibit symptoms of the disease, disorder, and/or condition. In some embodiments, an individual who is susceptible to a disease, disorder, and/or condition will develop the disease, disorder, and/or condition. In some embodiments, an individual who is susceptible to a disease, disorder, and/or condition will not develop the disease, disorder, and/or condition.

### Detailed Description of Certain Embodiments

### SARS-CoV-2

[0055] In some embodiments, the present disclosure provides compositions and methods for detection and/or diagnosis of SARS-CoV-2. SARS-CoV-2 is the causative agent of COVID-19. According to the United States Centers for Disease Control (“CDC”), early symptoms of COVID-19 often include one or more of: fever/chills, cough, shortness of breath or difficulty breathing, fatigue, muscle or body aches, headache, new loss of taste or smell, sore throat, congestion or runny nose, nausea or vomiting, and/or diarrhea. More serious symptoms often include, for example, trouble breathing, persistent pain or pressure in the chest, new confusion, inability to wake or stay awake, and/or bluish lips or face. Alternatively or additionally, COVID-19 patients may display low blood oxygenation (e.g., below 98%), and/or one or more symptoms or features of acute respiratory distress syndrome (ARDS) and/or pneumonia.

[0056] Reports suggest that individuals over age 60, and/or those with underlying immune conditions, may have particularly high risk of developing COVID-19 after exposure to and infection with SARS-CoV-2.

[0057] SARS-CoV-2 is a virus in the coronavirus family. Members of the coronavirus family are lipid membrane viruses with a positive sense single stranded RNA genome.

[0058] SARS-CoV-2 genomes have been sequenced from multiple human samples; such sequences are generally available, for example, through publication and/or deposit in publically-accessible databases. See NCBI Reference Sequence: NC_045512.2; Severe acute respiratory syndrome coronavirus 2 data hub (www.ncbi.nlm.nih.gov/labs/virus/vssi/#/virus?SeqType_s=Nucleotide&VirusLineage_ss=SARS-CoV-2,%20taxid:2697049); www.ncbi.nlm.nih.gov/genbank/sars-cov-2-seqs/#reference-genome.

[0059] FIG. 1 presents a representation of the SARS-CoV genomes and the open reading frames in includes. As can be seen, the genome encodes concated protein that is processed by the virally encoded protease.

### CRISPR Cas Collateral Activity

[0060] Recently, certain CRISPR/Cas enzymes have been identified that have an ability to non-specifically cleave collateral nucleic acid(s) when activated by binding to a target site recognized by the guide RNA with which they are complexed. Representative examples of Cas12, Cas13, and Cas14 enzymes have been shown to have such collateral cleavage activity. See, for example, Swarts and Jinek Mol Cell. 2019 Feb. 7; 73(3):589-600.e4; Harrington L. B. et al. Science. 2018; 362: 839-842; Li S. Y. et al. Cell Res. 2018; 28: 491-493; Chen J. S. et al., Science. 2018; 360: 436-439; Abudayyeh O. O. et al., Science. 2016; 353aaf5573; East-Seletsky A et al., Nature. 2016; 538: 270-273; Gootenberg J S et al.; Science 2017; 356:438-442; Myhrvold C, et al., Science 2018; 360:444-448; Gootenberg J S et al., Science 2018; 360:439-444. Some CRISPR/Cas enzyme collateral cleavage activity digests or cleaves single strand nucleic acids. Some CRISPR/Cas enzyme collateral cleavage activity digests or cleaves double stranded nucleic acids. Some CRISPR/Cas enzyme collateral cleavage activity digests or cleaves RNA. Some CRISPR/Cas enzyme collateral cleavage activity digests or cleaves DNA. Some CRISPR/Cas enzyme collateral cleavage activity digests or cleaves both RNA and DNA.

[0061] This collateral activity has been harnessed to develop detection (e.g., diagnostic) technologies that achieve detection of nucleic acids containing the relevant target site (or its complement) in biological and/or environmental sample(s). See, for example Gootenberg J S et al.; Science 2017; 356:438-442; WO2019/011022; U.S. Pat. Nos. 10,494,664B2; 10,337,051B2; 10,266,887; sherlock.bio/better-faster-affordable-diagnostic-testing.

[0062] The present disclosure provides particularly effective technology for detecting SARS-CoV-2 in biological and/or environmental samples, including by providing examples of effective such detection. For example, the present disclosure exemplifies detection of SARS-CoV-2 in nucleic acid isolated from nasopharyngeal swabs, utilizing certain Cas13 enzyme(s).

[0063] The present disclosure describes particular reagents—e.g., target sites, guide RNA sequences, amplification and/or signal generation technologies, and combinations thereof that together achieve important and surprising sensitivity and/or specificity for SARS-CoV-2 detection. The present disclosure also describes, for example, samples, formats, and various conditions (e.g., temperature, time, concentration of components etc) surprisingly effective in detecting SARS-CoV-2.

[0064] The present disclosure also identifies the source of certain problems and/or provides key insights that permit such achievement.

[0065] Provided Detection Technologies

[0066] FIG. 2 provides a workflow overview of a detection assay as exemplified herein. The assay depicted in FIG. 2 includes steps of:
[0067] (i) sample collection
[0068] (ii) target isolation/amplification
[0069] (iii) CRISPR/Cas collateral activity

[0070] The present disclosure provides insights and/or technologies relevant to each of these steps. In some embodiments, multiple steps described herein can be performed simultaneously. In some embodiments, one or more steps described herein can be performed in a single vessel, e.g., a one-pot reaction. In some embodiments, amplification and CRISPR/Cas collateral activity can occur in a single vessel.

[0071] The particular isolation technology used in isolation/amplification step is, in some embodiments, any sample processing that results in nucleic acid. One of skill in the art is aware of many sample processing techniques that result in stable nucleic acid isolation.

[0072] The particular target isolation/amplification technology depicted in FIG. 2 involves loop-mediated isothermal amplification (LAMP). In some embodiments, the amplification step comprises reverse transcription LAMP (RT-LAMP). Those skilled in the art will be aware that certain reported CRISPR/Cas Collateral Activity Detection methodologies (see, e.g., utilize alternative amplification technologies such as, for example, Nucleic Acid Sequence Based Amplification (NASBA); Strand Displacement Amplification; Recombinase Polymerase Amplification (RPA); Rolling Circle Amplification (RCA)). In some embodiments, one or more of such alternative amplification technologies may be employed in the practice of the present invention (e.g., together with other aspects and/or features described herein). However, the present disclosure identifies that, in certain embodiments, LAMP may be preferable at least because it provides increased speed and specificity and operates at a single constant temperature.

[0073] Those skilled in the art will be aware that certain software packages have been specifically developed for use with LAMP technologies, including to predict sequences of primers that are expected to be useful for any given target nucleic acid. Among other things, the present disclosure identifies the source of a problem with such predictions, and surprisingly finds particular sequences that demonstrate unexpected utility relative to others generated by such predictions.

[0074] In some embodiments, the amplification step comprises primers that comprise a promoter sequence. In some embodiments, primers comprise a RNA polymerase promoter sequence. In some embodiments, a RNA polymerase promoter sequence allows for transcription of DNA to RNA prior to the CRISPR/Cas enzyme detection. In some embodiments, a RNA polymerase promoter comprises pol I, pol II, pol III, T7, T3, SP6, U6, H1, retroviral Rous sarcoma virus (RSV) LTR promoter, the cytomegalovirus (CMV) promoter, the SV40 promoter, the dihydrofolate reductase promoter, the .beta.-actin promoter, the phosphoglycerol kinase (PGK) promoter, and the EF1.alpha. promoter.

[0075] The particular CRIPR/Cas collateral activity assay depicted in FIG. 2 utilizes a Cas13 enzyme. Those skilled in the art will be aware of numerous Cas13 enzymes useful for the assays described herein. Further, those skilled in the art will be aware of numerous methods, algorithms, and software for guide polynucleotide design. See e.g., sgRNA Designer (Broad) CRISPR Targeted Gene Designer (Horizon Discovery), https://en.wikipedia.org/wiki/CRISPR/Cas_Tools.

[0076] Sections below discuss in more detail various features and/or embodiments of certain aspects of provided technologies.

[0077] CRISPR/Cas Enzymes

[0078] In some embodiments, methods and compositions of the present disclosure utilize CRISPR/Cas enzymes. In some embodiments, methods and compositions of the present disclosure utilize Type V, or Type Type VI CRISPR/Cas enzymes. In some embodiments, methods and compositions of the present disclosure utilize Cas12, Cas13, and/or Cas14 CRISPR/Cas enzymes. In some embodiments, methods and compositions of the present disclosure utilize CRISPR/Cas enzymes described in WO2016/166340; WO2016/205711; WO/2016/205749; WO2016/205764; WO2017/070605; WO/2017/106657. In some embodiments, methods and compositions of the present disclosure utilize Cas13a CRISPR/Cas enzymes. In some embodiments, methods and compositions of the present disclosure utilize LwaCas13a CRISPR/Cas enzymes.

[0079] In some embodiments, methods and compositions of the present disclosure utilize thermostable CRISPR/Cas enzymes. In some embodiments, methods and compositions of the present disclosure utilize thermostable CRISPR/Cas enzymes encoded by sequences listed in table 1.

Lengthy table referenced here
US20240052436A1-20240215-T00001
Please refer to the end of the specification for access instructions.

[0080] The present disclosure teaches that, in some embodiments, it will be particularly desirable or useful to utilize a thermostable Cas enzyme. In some embodiments, a useful thermostable Cas protein is a Cas12 or Cas13 homolog (e.g., ortholog). In some embodiments, a useful thermostable Cas protein is a Cas enzyme comprising an amino acid sequence having 80%, 85%, 90%, 99% or 100% sequence identity to any one of SEQ ID Nos. 1-71 or 530-741.

[0081] Alternatively or additionally, in some embodiments, a useful thermostable Cas protein performs (e.g., its collateral cleavage activity functions sufficiently) at temperatures above about 50° C.; in some embodiments, above a temperature selected from the group consisting of about 55° C., about 56° C., about 57° C., about 58° C., about 59° C., about 60° C., about 61° C., about 62° C., about 63° C., about 64° C., about 65° C., about 66° C., about 67° C., about 68° C., about 69° C., about 70° C., about 71° C., about 72° C., about 73° C., about 74° C., about 75° C., about 76° C., about 77° C., about 78° C., about 79° C., about 80° C., about 81° C., about 82° C., about 83° C., about 84° C., about 85° C., about 86° C., about 87° C., about 88° C., about 89° C., about 90° C., about 91° C., about 92° C., about 93° C., about 94° C., about 95° C., about 96° C., about 97° C., about 98° C., about 99° C., about 100° C., or combinations thereof. In many embodiments, useful thermostable Cas protein performs (e.g., its collateral cleavage activity functions sufficiently) at temperatures above about 60° C.

[0082] In some embodiments, a useful thermostable Cas protein performs (e.g., its collateral cleavage activity functions sufficiently) within a temperature range at which nucleic acid extension and/or amplification reaction(s) are performed; those skilled in the art are well familiar with various such reactions and the temperature ranges at which they are performed, In some embodiments, such a temperature range may be above a temperature selected from the group consisting of about 60° C., about 61° C., about 62° C., about 63° C., about 64° C., 65° C., about 66° C., about 67° C., about 68° C., about 69° C., about 70° C., about 71° C., about 72° C., about 73° C., about 74° C., about 75° C., about 76° C., about 77° C., about 78° C., about 79° C., about 80° C., about 81° C., about 82° C., about 83° C., about 84° C., about 85° C., about 86° C., about 87° C., about 88° C., about 89° C., about 90° C., about 91° C., about 92° C., about 93° C., about 94° C., about 95° C., about 96° C., about 97° C., about 98° C., about 99° C., about 100° C., or combinations thereof. In some embodiments, a temperature range may be about 60° C. to about 90° C. In some embodiments, a temperature range may be about 60° C. to about 80° C. In some embodiments, a temperature range may be about 60° C. to about 75° C. In some embodiments, a temperature range may be about 65° C. to about 90° C. In some embodiments, a temperature range may be about 60° C. to about 80° C. In some embodiments, a temperature range may be about 60° C. to about 75° C.

[0083] The present disclosure furthermore teaches that a thermostable Cas enzyme as described herein may be particularly useful when and/or may permit multiple reaction steps to be performed in a single reaction/vessel (e.g., for “one pot” reactions). Thus, in some embodiments, use of a thermostable Cas may reduce or eliminate certain processing and/or transfer steps. In some embodiments, all reaction steps beyond nucleic acid isolation may be performed in a single vessel (e.g., in a “one pot” format).

[0084] Guide Polynucleotides

[0085] In some embodiments, the present disclosure provides guide polynucleotides. that recognize and bind a target nucleic acid of interest. In some embodiments, a guide polynucleotide is a guide RNA (gRNA, sgRNA). In some embodiments guide polynucleotides of the present disclosure comprise a crRNA. In some embodiments a crRNA is complementary to a target nucleic acid of interest.

[0086] Those skilled in the art will be aware of numerous methods to design and identify guide polynucleotides for a target nucleic acid of interest. Those skilled in the art will be aware of numerous algorithms and software useful to design guide polynucleotides for a target nucleic acid of interest.

[0087] The present disclosure used available algorithms to design guides based on available SARS-CoV-2 sequences. The present disclosures describes tests to empirically identify which, if any, of those guide polynucleotides suggested by existing algorithms were useful in the presently described methods and compositions. As described further in the Examples, only those guide RNAs specifically identified and empirically tested as described in this disclosure were useful for the detection of SARS-CoV-2 in the presently described CRISPR based detection assay.

[0088] In some embodiments, a guide polynucleotides has 60%, 70%, 80%, 90%, 95%, 90% sequence identity to a sequence listed in Table 23 In some embodiments, a guide polynucleotide comprises a crRNA disclosed in Table 17. In some embodiments, a crRNA used in a guide polynucleotide has 60%, 70%, 80%, 90%, 95%, 90% sequence identity to a crRNA listed in Table 17

[0089] LAMP

[0090] As noted above, among other things, the present disclosure provides certain LAMP technologies, and/or components thereof, whose particular usefulness and/or effectiveness is documented herein. In some embodiments, amplification is performed as described in WO2000/028082; WO2001/034790; WO2001/077317; or WO2002/024902.

[0091] One of skill in the art will be aware of numerous method to design primers useful in LAMP. The present disclosures describes tests to empirically identify which, if any, of those LAMP primers suggested by existing algorithms were useful in the presently described methods and compositions. As described further in the Examples, only those LAMP primers specifically identified and empirically tested as described in this disclosure were useful for the detection of SARS-CoV-2 in the presently described CRISPR based detection assay.

[0092] In some embodiments, a LAMP primer has 60%, 70%, 80%, 90%, 95%, 90% sequence identity to a sequence listed in Table 20. has 60%, 70%, 80%, 90%, 95%, 90% sequence identity to a primer sequence listed in Table 17.

[0093] Labeled Nucleic Acid Reporter Constructs

[0094] In some embodiments, the present disclosure provides labeled nucleic acid reporter constructs. In accordance with the present disclosure, cleavage activity (e.g., collateral activity) of a CRISPR/Cas enzyme may be detected by detecting cleavage of an appropriate labeled nucleic acid reporter construct. Typically, a labeled nucleic acid reporter construct for use in accordance with the present disclosure is characterized in that its cleavage can be detected. Those skilled in the art are aware of a variety of strategies for and embodiments of labeled nucleic acid reporter constructs whose collateral cleavage by a particular Cas enzyme is detectable. To give but one example, in some embodiments, a labeled nucleic acid reporter construct may be labeled with a fluorescence-emitting-dye pair (e.g., a FRET pair or a fluor/quencher pair), such that a change (e.g., an increase—such as when cleavage relieves quenching, a decrease, a change in wavelength, or combinations thereof) in fluorescence is observed when the labeled nucleic acid reporter construct is cleaved. Appropriate FRET pairs are known in the art (see, for example, Bajar et al sensors (Basel), 2016; Abraham et al. PLoS One 10:e0134436, 2015).

[0095] Various other strategies for detecting cleavage of a labeled nucleic acid reporter construct are also known in the art and include, for example, masking constructs as described with respect to SHERLOCK™ (see, e.g., WO 2018/107129, incorporated herein by reference).

[0096] Sample

[0097] In some embodiments, methods and compositions of the present disclosure detect target nucleic acids in a sample. In some embodiments a sample is an environmental sample.

[0098] In some embodiments, a sample is a biological sample. In some embodiments, a biological sample is collected from a subject (e.g., a human or animal subject). In some embodiments, an animal subject may be a pangolin, bird or a bat. In some embodiments, an animal subject may be a domesticated animal, such as a farm animal or a pet. In some embodiments, an animal subject may be a cat, cow, dog, goat, horse, llama, pig, sheep, etc. In some embodiments, an animal subject may be a rodent. In some embodiments, a subject may be a primate, In some embodiments, a subject may be a human.

[0099] In some embodiments, a biological sample is obtained from a subject—e.g., from a fluid or tissue of the subject. In some embodiments, a sample is obtained from a subject by means of a swab, an aspirate, or a lavage. In some embodiments, a sample is obtained from a subject by means of a nasal swab, nasopharyngeal swab, oropharyngeal swab, nasal aspirate, sputum, bronchoalveolar lavage.

[0100] In some embodiments, a sample collected using a swab is collected using swabs with a synthetic tip, such as nylon or Dacron®, and an aluminum or plastic shaft. In some embodiments, calcium alginate swabs are not used. In some embodiments, cotton swabs with wooden shafts are not used. In some embodiments, a swab is paces immediately into a sterile tube containing 2-3 ml of viral transport media (i.e. VTM, UTM, M4RT).

[0101] In some embodiments a sample is processed. In some embodiments, a sample is processed by dilution, filtration, clarification, distillation, separation; isolation; and/or cryopreservation. In some embodiments, a sample is processed by isolation of specific components. In some embodiments, a sample is processed by isolation of nucleic acid. In some embodiments, RNA is isolated from a sample. In some embodiments, DNA is isolated from a sample. In some embodiments nucleic acid is isolated from a sample using a column. In some embodiments an isolated nucleic acid is diluted after isolation prior to detection of a target nucleic acid. In some embodiments an isolated nucleic acid is serially diluted after isolation isolation prior to detection of a target nucleic acid.

### Limits of Detection

[0102] In some embodiments, methods and compositions of the present disclosure provide sensitive detection of a target nucleic acid. In some embodiments, methods and compositions of the present disclosure can detect 3, 5, 7, 9, 11, 13, 15, 17, 19, 21, 23, 25, 27, 29, 31, 33, 35, 37, 39, 41, 43, 45, 47, 49, 51, 53 viral copies of target nucleic acid/μL extracted RNA. In some embodiments, methods and compositions of the present disclosure can detect between 3-11, 5-13, 7-15, 9-17, 11-19, 15-21, 19-23, 21-25, 23-27, 25-31, 27-33, 29-35, 31-37, 33-39, 37-41, 39-45, 45-49, 47-53 viral copies of target nucleic acid/μL extracted RNA.

[0103] Formats

[0104] In some embodiments, the present disclosure provides particularly useful and/or effective format(s) for detection of SARS-CoV-2.

[0105] In some embodiments, nucleic acid isolation may involve, for example, cell disruption, digestion and/or removal of non-nucleic acid cellular components, and/or precipitation of nucleic acid. In some embodiments, reagents for nucleic acid isolation may include thiocyanic acid, compound with guanidine (1:1); Proteinase K; heat; denaturing agents; detergents; carrier RNA (e.g., yeast tRNA). In some embodiments, reagents for nucleic isolation may include phenol/chloroform; BHT; BHA; Surfactin; Capric (8:0); Caprylic (10:0); Lauric acid; Palmitoleic (16:1); Oleic (18:1); Linoleic (18:2); Linolenic (18:3); Arachidonic (20:4); Docosahexaenoic (22:6); Triolein; Monocaprylin; Monocaprin; Monolaurin; Monoolein; Monolinolein; Monolaurin+BHA; Monolaurin+sorbic acid; Decanol; Dodecanol; L-Arginine.

[0106] In some embodiments, two or more of target amplification; activation of CRISPR/Cas collateral activity; and detection of signal may be performed in the same reaction vessel. In some embodiments, all of target amplification; activation of CRISPR/Cas collateral activity; and detection of signal are performed in the same reaction vessel.

[0107] In some embodiments target amplification involves loop-mediated isothermal amplification (LAMP). Indeed, in some embodiments, the present disclosure provides an insight that LAMP provides certain unexpected advantages relative to alternative amplification technologies (e.g., Nucleic Acid Sequence Based Amplification (NASBA); Strand Displacement Amplification; Recombinase Polymerase Amplification (RPA); Rolling Circle Amplification (RCA)).

[0108] In some embodiments, reagents for LAMP may include, for example, Bst 2.0 WarmStart DNA polymerase and WarmStart RTx Reverse transcriptase in a buffer.

### EXAMPLES

### Example 1. General Sherlock SARS-CoV-2 Molecular Diagnostic Assay

[0109] The present example describes preparation of diagnostic and detection assays described herein. LAMP primers were obtained from a 100 nmol scale synthesis, using standard desalt purification, and resuspended to 100 μM using nuclease free molecular grade water. A 10×LAMP primer mix was made prior to running the assay. crRNAs were obtained from a 2 nmol scale synthesis, using standard desalt purification, and resuspended to 1 μM using nuclease free molecular grade water.

[0110] A 10×LAMP primer Mix was prepared in nuclease-free water. Primer 10× stock solutions of 2 μM F3, 2 μM B3, 16 μM FIP, 16 μM BIP, 4 μM Loop-F, and 4 μM Loop B were prepared. In the 100 uL reaction for SARS-CoV-2 N, the following volumes of the prepared 10× stocks were used: 2 μL of the F3 and B3, 16 μL of the FIP and BIP, and 4 μL of the Loop-F and Loop-B with added 56 μL water. In the 100 μL reaction for SARS-CoV-2 Orf1AB, the following volumes of the prepared 10× stocks were used: 2 μL of the F3 and B3, 16 μL of the FIP and BIP, and 4 μL of the Loop-F with added 60 μL water. In the 100 μL reaction for SARS-CoV-2 RNaseP, the following volumes of the prepared 10× stocks were used: 2 μL of the F3 and B3, 16 μL of the FIP and BIP, and 8 μL of the Loop-F and Loop-B with added 48 μL water.

[0111] A carrier RNA was prepared by adding 310 μL RNase-free Water to 310 μg lyophilized Carrier RNA, to obtain 1 μg/L carrier RNA stock solution. A wash buffer was prepared. 60 mL of 96-100% ethanol was added to 15 mL Wash Buffer (WII) concentrate.

[0112] A lysis buffer was prepared. The volume of Lysis Buffer/Carrier RNA mix required to process the samples simultaneously was calculated using the following formula: N×0.21 mL (volume of Lysis Buffer/reaction)=A mL, A mL×28 μL/mL=B μL. Where N=number of samples, A=calculated volume of Lysis Buffer (L22), and B=calculated volume of 1 μg/μL Carrier RNA stock solution to add to Lysis Buffer (L22). To 1 μg/μL Carrier RNA stock solution, the volume of Carrier RNA stock solution (B, calculated as above) to the volume of Lysis Buffer (A, calculated as above) was added.

[0113] A lysate was prepared. To 25 μL Proteinase K in a microcentrifuge tube, 200 μL of cell-free sample (equilibrated to room temperature) was added. To this tube, 200 μL Lysis Buffer (containing 5.6 μg Carrier RNA) was added and mixed by vortexing at speed 7 to 8 out of 10 for 15 seconds. The tube was incubated in a dry heat block at 56° C. for 15 minutes. Following pulse centrifugation of the sample-lysis mixture tube to remove any drops from the inside of the lid. The Tube was then ready for the binding and washing step.

[0114] The prepared RNA/DNA sample was bound and washed by adding 250 μL 96-100% ethanol to the lysate tube to obtain a final ethanol concentration of 37%, followed by vortexing at speed 7-8 out of 10 for 15 seconds. The tube was then incubated for 5 minutes at room temperature (19° C. to 26° C.). The tube was pulse centrifuged to remove any drops from the inside of the lid. The lysate in the ethanol (˜675 μL) was transferred onto a spin column which was subjected to centrifugation at ˜6800×g for 1 minute. The spin column was placed in a clean wash tube and 500 μL Wash Buffer (WII) with ethanol was added to the spin column and subjected to centrifugation at ˜6800×g for 1 minute twice, discarding the collection tube after each centrifugation and discarding the flowthrough. The spin column was dried by centrifugation at >13,000×g. Elution of the RNA/DNA was accomplished by placing the spin column in a clean 1.5-mL recovery tube, and 30 μL of Sterile, RNase-free water was added to the column and incubated at room temperature for about 1 min, then the tubes were subjected to centrifugation at 13,000×g for 1 minute, the eluant contains purified viral nucleic acids.

[0115] An amplification reaction having a final volume of 20 uL using LAMP was conducted by preparing a LAMP master mix and 10× primer stock containing the desired primers To the 12 uL LAMP master mix/primer stock, 8 μL of target was added and mixed, spun down. The sample was then placed in a thermocycler/heating block set to 61° C. for 40 minutes.

[0116] CRISPR-Cas detection was conducted in a 25 uL volume in a fluorescence microplate at 37° C. A 2 μM RNase alert stock solution was prepared by resuspending individual tubes with 25 μL of nuclease-free water. A Cas Master Mix were prepared. A Cas master mix contained RNase Alert (125 nM), rNTP mix 1 mM, T7 RNA polymerase (1 U/μL), Murine RNase Inhibitor (1 U/μL), LwaCas13a (6.33 ng/μL), crRNA (SARS-CoV-2 N or SARS-CoV-2 Orf1AB or RNaseP) (22.5 nM), and MgCl₂ (9 mM).

[0117] 20 μL of each Cas Mix was combined with 5 μL of amplified LAMP sample into an 8-tube strip mix, pulse vortexed, and spun down. Then 20 μL from the LAMP-Cas Mix 8 strip tube was added to a 384 Corning black clear bottom well plate and sealed. The plate was placed into the plate 37° C. for 15 minutes with a read at 1-minute intervals.

[0118] Data extraction and analysis was performed after the completion of the plate reader run and the data was exported to an excel sheet. For the negative control samples the ratio of the final reading (T15) to the initial reading (T0) for each target analyte and for the positive control samples as well as all patient or contrived samples, was calculated.

[0119] Controls were defined as “negative control” when a “no input RNA” reaction was set up as a negative control for amplification. “Positive control” was extracted viral RNA is used as template for LAMP reactions at a concentration of 5000 cp/uL for amplification and detection for each of the SARS-CoV-2 target analytes. Data Analysis and Results Interpretation was conducted such that a sample is considered positive if the final signal is ≥5 fold higher than a valid “no input RNA” sample, and all control assays gave the appropriate results (defined below).

| Result | Interpretation |
|---|---|
| All “Negative Control” sample signals | Negative Control result is “valid” and |
| increase less than 3 folds from the initial | Negative Control signal intensity can be |
| read to the final read (i.e., T0 to T15) | used as background. Test run is valid |
| Any “Negative Control” sample increases ≥3 | Negative Control result is “not valid”; |
| folds from the initial read to the final read | Test run is not valid |
| At T15, signal from all “Positive Control” | Test run is valid |
| samples increase ≥5 fold of valid | |
| “Negative Control” signal | |
| At T15, signal from any “Positive | Test run is not valid |
| control” sample is <5 fold of “Negative | |
| Control” signal | |
| At T15, Patient sample signal is ≥5 fold | Sample is positive for COVID-19 |
| of “Negative Control” signal for one or | |
| both CoV Targets | |
| At T15, Patient sample signal is <5 fold | Sample is negative for COVID-19 |
| of “Negative Control” signal for both | |
| CoV targets AND RNaseP signal is ≥5 | |
| fold of “Negative Control” signal | |
| At T15, Patient sample signal is <5 fold | Test result is not valid and sample |
| of “Negative Control” signal for both | should be retested |
| CoV targets AND RNaseP signal is <5 | |
| fold of “Negative Control” signal | |

### Example 2. Determination and Confirmation of the Limit of Detection (LoD)—Planning

[0120] The present example describes preparations for determination of the limit of detection of the SARS-CoV-2 diagnostic.

[0121] The SARS-CoV-2 genomic RNA used in the studies originated from a viral culture of SARS-CoV-2 (isolate 2019-nCoV/USA-WA1/2020, MN985325) propagated in Cercopithecus aethiops epithelial kidney cells and stabilized in Trizol. SARS-CoV-2 genomic RNA was purified using PureLink™ Viral DNA/RNA Mini Kit and eluted in 60 μL of nuclease-free water. After quantifying eluted RNA via two independent digital PCR experiments, the concentrated RNA was diluted to 48,000 cp/μL, aliquoted into single use aliquots, stored at −80 C and thawed once immediately before use. This stock of viral RNA was serially diluted in water to create a range of concentrations.

[0122] Negative Matrix (NM) was pooled nasopharyngeal swab matrix, collected from 32 symptomatic flu patients, screened by RT-qPCR using the CDC/New York State Department of Health primer probe set (protocol LVD SOP-151.0), and confirmed to be negative for SARS-CoV-2 N1 and N2 target and positive for RNase P was used in this study.

[0123] Creation of LoD Panel Members: Each sample tested in this study was created by the addition of 10 microliters of quantified SARS-CoV-2 genomic RNA (positives) or water (negatives) to lysis-treated negative matrix, in order to achieve the desired viral concentration. Ten microliters of viral culture (for contrived clinical positives) or water (for negatives) was added to 200 microliters of the Negative matrix after addition of 225 microliters of PureLink lysis buffer/Proteinase K mixture, and incubation at 56° C. for 15 minutes. This contrived sample was extracted using the PureLink Viral RNA extraction kit, following the manufacturer's instructions with a final elution volume of 30 microliters. Eight microliters of this eluted sample was used as template for each analyte targeted by the CRISPR SARS-CoV-2 Assay (i.e., two SARS-CoV-2 target analytes and the RNaseP control).

[0124] Controls were as follows: 1) Extraction Control: RNaseP detection serves as an extraction control in the absence of a SARS-CoV-2 signal. 2) Negative Control: A “no input RNA” reaction was set up as a negative control for amplification and to determine background detection levels for the Cas reaction. This was performed for each LAMP primer set and each guide to be tested. The negative control was created by replacing the 8 ul template volume in the LAMP reaction with an equal volume of nuclease-free water. 3) Positive Control: A positive control for amplification and detection of the SARS-CoV-2 analytes was performed for each Orf1AB and N LAMP primer set and each Orf1AB and N guide to be tested. The positive control was created by replacing the 8 ul template volume in the LAMP reactions with an equal volume of viral RNA extracted from the SARS-CoV-2 Viral RNA Stock Material described above at a concentration of 5000 copies per ul in nuclease free water. The Positive Control was purified using a PureLink Viral RNA extraction kit. Final RNA was eluted in 60 μL of nuclease-free water. Purified viral genomic RNA was quantified by digital PCR and diluted to 5000 copies per microliter in nuclease free water. Positive control aliquots were stored in single use 25 microliter aliquots at a temperature less than negative 70° C. and thawed once immediately before use.

[0125] Pooled nasopharyngeal (NP) swab matrix, collected from symptomatic flu patients in the 2019-2020 Flu season and determined to be SARS-CoV-2 negative by RT-qPCR assay using the CDC primer/probe set, was used to perform analytical sensitivity (LoD) studies. LoD was determined by having three operators run the SHERLOCK assay on a series of 7 concentrations of quantified viral material spiked into the pooled NP swab matrix, plus a pooled NP swab matrix without viral material. LoD was confirmed with twenty replicates at the lowest concentration of the series determined to be positive for 3/3 replicates of the worst performing target. Additionally, 20 replicates of 2× the presumptive LoD along with 20 replicates of matrix alone was assayed by SHERLOCK operator. LoD confirmation was run by 4 operators. The final LoD is defined by the lowest concentration displaying at least 19/20 positive replicates for both targets (N and Orf1ab). See Table 2 below. Additionally, if the targets are determined to have different putative LoDs in the initial titration both targets can be confirmed independently if desired, this will involve creating an additional 20 replicates at the lowest concentration of the series determined to be positive for 3/3 replicated of the best performing target.

[0126] The Sherlock CRISPR SARS-CoV-2 Test was performed on NP swab samples for every sample processed for the LoD Determination study outlined below.

TABLE 2

| | Analytical | Sub- | Study | 0× | | Concentrations | | | | | | |
|---|---|---|---|---|---|---|---|---|---|---|---|---|
| | Parameter | category | design | con | .25× | .5× | 1× | 1.5× | 2× | 3× | 5× | LOD |
| 1 | LOD | Analytical | Replicates | 3 | 3 | 3 | 3 | 3 | 3 | 3 | 3 | 20 |
| | | Sensitivity | days | 1 | 1 | 1 | 1 | 1 | 1 | 1 | 1 | 1 |
| | | | Operators | 3 | 3 | 3 | 3 | 3 | 3 | 3 | 3 | 4 |

| | Analytical | Sub- | Study | 2× | 3× | | |
|---|---|---|---|---|---|---|---|
| | Parameter | category | design | LOD | LOD | NT | notes |
| 1 | LOD | Analytical | Replicates | 20 | | 20 | Pooled NP clinical negative matrix |
| | | Sensitivity | days | 1 | | 1 | |
| | | | Operators | 4 | | 4 | 4 total operators on 1 day |

LoD Estimation: The viral culture was diluted in nuclease-free water, and then spiked into 200 microliters of the NP matrix AFTER addition of 225 microliters of the PureLink lysis buffer/Proteinase K mixture, and incubation at 56° C. for 15 minutes to achieve concentrations predicted to be 0×, 0.25×, 0.5×, 1×, 1.5×, 2×, 3×, and 5× the LoD based upon previous testing. N=3 replicates of each of the N=7 concentrations along with the Negative matrix only sample was tested by three independent operators. These contrived samples were extracted using the PureLink Viral RNA extraction kit with a final elution volume of 30 μL. 8 μL of this eluate was used as template for each SHERLOCK reaction detecting the CRISPR SARS-CoV-2 Assay target analytes (i.e., N and Orf1AB) as well as the RNaseP control. The estimated LoD for each CRISPR SARS-CoV-2 Assay target analyte was the lowest concentration that is detected as positive for 3 out of 3 replicates.

[0127] Sample Extraction: Samples 1-8 were extracted. Sample extraction information for Phase I-LoD Estimation was tracked by the following table 3

TABLE 3

| Sample # | Panel Member ID | Description |
|---|---|---|
| 1 | [initials]-[date]-01 | 5x |
| 2 | [initials]-[date]-02 | 3x |
| 3 | [initials]-[date]-03 | 2x |
| 4 | [initials]-[date]-04 | 1.5x |
| 5 | [initials]-[date]-05 | 1x |
| 6 | [initials]-[date]-06 | 0.5x |
| 7 | [initials]-[date]-07 | 0.25x |
| 8 | [initials]-[date]-08 | 0x |

LAMP Amplification: LAMP reactions was performed according to the layout above using the strip template below for reaction set up.

| Strip | Primer | Position in Strip | | | | | | | |
|---|---|---|---|---|---|---|---|---|---|
| ID | Mix | Well 1 | 2 | 3 | 4 | 5 | 6 | 7 | 8 |
| [initials]- | Orf1AB | Sample | Sample | Sample | Sample | Sample | Sample | Sample | Sample |
| 1 | | 1 | 2 | 3 | 4 | 5 | 6 | 7 | 8 |
| [initials]- | N | Sample | Sample | Sample | Sample | Sample | Sample | Sample | Sample |
| 2 | | 1 | 2 | 3 | 4 | 5 | 6 | 7 | 8 |
| [initials]- | RNaseP | Sample | Sample | Sample | Sample | Sample | Sample | Sample | Sample |
| 3 | | 1 | 2 | 3 | 4 | 5 | 6 | 7 | 8 |
| [initials]- | Orf1AB | Orf1AB | N | <empty> | Orf1AB | N | RNaseP | <empty> | <empty> |
| 4 | or N | Positive | Positive | | Negative | Negative | Negative | | |
| | or | Control | Control | | Control | Control | Control | | |
| | RNaseP | | | | | | | | |

[0128] For each extracted sample, one LAMP reaction was performed for each of three primer sets. Additionally, a positive control for LAMP-Cas detection of CoV targets was included (previously extracted viral RNA at 5000 cp/μL). One negative control for LAMP-Cas with water instead of template was performed for each LAMP Primer Set and Cas reaction.

[0129] Phase I LoD Estimation/Cas Detection: Cas reactions was set up and performed following the steps listed in the Sherlock CRISPR SARS-CoV-2 Test Instruction. Reactions was performed in a 384 well plate following the template below.

| CasGuide | | | | |
|---|---|---|---|---|
| RNA: | Orf1AB | N | RNaseP | As indicated |
| LAMP | [initials]- | [initials]- | [initials]- | [initials]-4 |
| Strip | 1 | 2 | 3 | |
| ROW/ | 1 | 3 | 5 | 7 |
| Column | | | | |
| A | 8 | 8 | 8 | <empty> |
| C | 7 | 7 | 7 | <empty> |
| E | 6 | 6 | 6 | RNaseP negative |
| | | | | control |
| G | 5 | 5 | 5 | N Negative control |
| I | 4 | 4 | 4 | Orf1AB Negative |
| | | | | control |
| K | 3 | 3 | 3 | <empty> |
| M | 2 | 2 | 2 | N Positive Control |
| O | 1 | 1 | 1 | Orf1AB Positive |
| | | | | Control |

[0130] Phase II—LoD Confirmation: Twenty replicates of the estimated LoD (as determined from Phase I testing) or 2× the LoD was spiked into NM. Twenty replicates of matrix alone was assayed simultaneously. Each extraction was tested with the Sherlock™ CRISPR SARS-CoV-2 Test for each of the two SARS-CoV-2 target analytes as well as RNaseP. If ≥19/20 replicates for each of the SARS-CoV-2 targets is positive for SARS-CoV-2, the LoD will have been said to be established. If <19/20 replicates are positive, the study was repeated with at least a 2× higher input of viral RNA until the LoD is determined. Included in all LAMP runs was a positive control as described above and a no template negative control.

[0131] For LoD Confirmation Sample information, LAMP set up and Cas set up followed the protocol according to the tables below.

| Sample # | Panel Member ID | Description |
|---|---|---|
| 101 | [initials]-[date]-101 | 1xLoD |
| 102 | [initials]-[date]-102 | 1xLoD |
| 103 | [initials]-[date]-103 | 1xLoD |
| 104 | [initials]-[date]-104 | 1xLoD |
| 105 | [initials]-[date]-105 | 1xLoD |
| 106 | [initials]-[date]-106 | 2xLoD |
| 107 | [initials]-[date]-107 | 2xLoD |
| 108 | [initials]-[date]-108 | 2xLoD |
| 109 | [initials]-[date]-109 | 2xLoD |
| 110 | [initials]-[date]-110 | 2xLoD |
| 111 | [initials]-[date]-111 | NTC |
| 112 | [initials]-[date]-112 | NTC |
| 113 | [initials]-[date]-113 | NTC |
| 114 | [initials]-[date]-114 | NTC |
| 115 | [initials]-[date]-115 | NTC |

| | Primer | | | | | | | | |
|---|---|---|---|---|---|---|---|---|---|
| Strip ID | Mix | Well 1 | 2 | 3 | 4 | 5 | 6 | 7 | 8 |
| [initials]- | Orf1AB | Sample | Sample | Sample | Sample | Sample | <empty> | <empty> | <empty> |
| 01 | | 101 | 102 | 103 | 104 | 105 | | | |
| [initials]- | Orf1AB | Sample | Sample | Sample | Sample | Sample | <empty> | <empty> | <empty> |
| 02 | | 106 | 107 | 108 | 109 | 110 | | | |
| [initials]- | Orf1AB | Sample | Sample | Sample | Sample | Sample | <empty> | <empty> | <empty> |
| 03 | | 111 | 112 | 113 | 114 | 115 | | | |
| [initials]- | Orf1AB | Orf1AB | Orf1AB | <empty> | <empty> | <empty> | <empty> | <empty> | <empty> |
| 04 | | Positive | Negative | | | | | | |
| | | Control | Control | | | | | | |
| [initials]- | N | Sample | Sample | Sample | Sample | Sample | <empty> | <empty> | <empty> |
| 05 | | 101 | 102 | 103 | 104 | 105 | | | |
| [initials]- | N | Sample | Sample | Sample | Sample | Sample | <empty> | <empty> | <empty> |
| 06 | | 106 | 107 | 108 | 109 | 110 | | | |
| [initials]- | N | Sample | Sample | Sample | Sample | Sample | <empty> | <empty> | <empty> |
| 07 | | 111 | 112 | 113 | 114 | 115 | | | |
| [initials]- | N | N | N | <empty> | <empty> | <empty> | <empty> | <empty> | <empty> |
| 08 | | positive | Negative | | | | | | |
| | | control | control | | | | | | |
| [initials]- | RNaseP | Sample | Sample | Sample | Sample | Sample | <empty> | <empty> | <empty> |
| 09 | | 101 | 102 | 103 | 104 | 105 | | | |
| [initials]- | RNaseP | Sample | Sample | Sample | Sample | Sample | <empty> | <empty> | <empty> |
| 10 | | 106 | 107 | 108 | 109 | 110 | | | |
| [initials]- | RNaseP | Sample | Sample | Sample | Sample | Sample | <empty> | <empty> | <empty> |
| 11 | | 111 | 112 | 113 | 114 | 115 | | | |
| [initials]- | RNaseP | <empty> | RNaseP | <empty> | <empty> | <empty> | <empty> | <empty> | <empty> |
| 12 | | | Negative | | | | | | |
| | | | Control | | | | | | |

[0132] Statistical/Analysis Methods, Sample Size and Acceptance Criteria:
[0133] i) During Phase I (LoD Estimation), the estimated LoD for each CRISPR SARS-CoV-2 Assay target analyte was the lowest concentration that is positive for 3 out of 3 replicates.
[0134] ii) During Phase II (LoD Confirmation), the LoD was confirmed if:
   [0135] ≥19/20 replicates for each of the CRISPR SARS-CoV-2 Assay target analytes is positive for SARS-CoV-2 detection, and
   [0136] 20/20 replicates of matrix alone are negative for SARS-CoV-2 detection.

[0137] Result Reporting:
[0138] a) The negative control reactions must produce a Cas signal that increases less than 3-fold over the course of the 15 minute read (defined by the ratio of T15/T0) for the negative control to be valid for the target.
[0139] b) The positive control must be positive for both CoV targets; AND the negative controls must be negative for all three targets for the assay run to be valid.
[0140] c) In the event that one or more of the positive or negative controls fails to produce the expected results, the affected assay run must be repeated.
[0141] d) A sample is considered positive for a target if the Cas signal increases ≥5-fold at the T15 reading over a valid negative control (“no RNA added”) reaction for that target.
[0142] e) A sample is negative for COVID-19 if at T15, a Patient sample signal is <5 fold of the Negative Control signal for both CoV targets AND RNaseP signal is ≥5 fold of Negative Control signal.
[0143] f) A sample is invalid if at T15, a Patient sample signal is <5 fold of the Negative Control signal for both CoV targets AND RNaseP signal is <5 fold of Negative Control signal. This sample must be repeated starting at the extraction step.

### Example 3. Determination and Confirmation of the Limit of Detection

### 1. Abstract

[0144] The Limit of Detection (LoD) study was performed in two phases. Pooled nasopharyngeal (NP) swab samples (confirmed in a one-step RT-qPCR experiment to be negative for COVID19 using CDC/New York State Department of Health primer and probes) were spiked with either quantitated viral SARS-CoV-2 culture or nuclease-free water and then were processed utilizing the Sherlock™ CRISPR SARS-CoV-2 assay and kit.

[0145] In Phase I (“LoD Estimation”), triplicate replicates of limiting dilutions of viral SARS-CoV-2 RNA were extracted in the presence of negative clinical matrix using the PureLink™ Viral RNA/DNA Mini Kit, and the extracted RNA was assayed by the Sherlock™ CRISPR SARS-CoV-2 test for two SARS-CoV-2 target analytes (i.e. ORF1ab and N) as well as an RNase P extraction control. The putative LoD for ORF1ab was 4.5 copies/μL of VTM and the putative LoD of N was 0.9 copies/μL of VTM.

[0146] During Phase II (“LoD Confirmation”), LoD was confirmed for ORF1ab and N independently. Twenty (20) replicate samples of the putative 1×LoD concentration for ORF1ab and 20 replicates for 1.5×LoD ORF1ab were tested. Additionally, twenty (20) replicates of a 1×LoD concentration for N and 20 replicates at LoD concentration of 1.5× putative LoD N were assayed simultaneously as described above. See FIG. 8.

[0147] The LoD of ORF-1ab was determined to be 6.75 copies/μL of VTM and the LoD of N was determined to be 1.35 copies/μL of VTM. The LoD of the Sherlock™ CRISPR SARS-CoV-02 kit is 6.75 copies/μL.

### 2. Test Method:

[0148] a. Test Object:

[0149] Negative Matrix (NM): Pooled nasopharyngeal swab matrix, collected from 53 symptomatic flu patients, screened using the CDC/New York State Department of Health primers and probes (LVD SOP-151.0) in a one-step RT-qPCR protocol, and confirmed to be negative for SARS-CoV-2 N1 and N2 target and positive for RNase P was used as the clinical matrix for this study.

[0150] Viral genomic RNA from a viral culture of SARS-CoV-2 grown in Vero cell line (stabilized in Trizol) was purified using PureLink™ Viral DNA/RNA Mini Kit and eluted in 60 μL. After quantifying eluted RNA via two independent digital PCR experiments, the concentrated RNA was diluted to 48,000 cp/μL in nuclease free water. This stock of viral RNA was serially diluted in water to create a range of concentrations. Contrived positive samples were generated by spiking in viral dilutions to lysed Negative Matrix (pooled clinical nasopharyngeal samples).

[0151] Controls: As described in the LoD Protocol PRO-100-0004 Rev 01, every experimental run of LAMP to Cas reactions contained a positive control for both CoV targets (previously extracted viral RNA at 4,800 copies/μL added directly to the LAMP reaction mix) as well as a negative “no RNA added” control (NTC).

[0152] b. Equipment/Instrumentation:

[0153] Equipment and instrumentation used in the study are listed in Example 5.

[0154] c. Summary of Protocol Steps (Summarize Test Procedure):

[0155] LoD Phase I
[0156] Three replicates at LoD concentrations of 0×, 0.25×, 0.5×, 0.75×, 1×, 1.25×, 1.5×, 1.75×, 2×, 3×, and 5× were tested to estimate LoD.
[0157] Three operators each performed nucleic acid extraction on 11 samples, and eluted purified RNA in 30 μL of water.
[0158] Each operator prepared three 2×RT-LAMP mixes (one for each target: ORF1ab, N, RNase P), enough for 11 samples and 2 controls, and aliquoted 12 μL into strip tubes.
[0159] Operators added 8 uL of eluted RNA to corresponding strip tubes and incubated the LAMP reaction for 40 minutes at 61° C.
[0160] Each operator prepared three CRISPR-Cas mixes (one for each target: ORF1ab, N, RNase P) containing the corresponding CRISPR guide RNA (crRNA), and aliquoted 20 μL into strip tubes.
[0161] Operators sealed the Cas plate and placed it into a plate reader at 37° C. and relative fluorescent signal intensity data was collected at 2.5-minute intervals for a total of 15 minutes.

[0162] LoD Phase II
[0163] Twenty replicate samples of the estimated 1×N LoD (as determined from Phase I testing) were tested along with 20 replicates at the 1×ORF1ab LoD. Additionally, 20 replicates of the estimated N 1.5×LoD (from Phase 1 testing) and 20 replicates at the 1.5×ORF1ab LoD were tested to confirm the LoD for both SARS-CoV-2 targets (ORF1ab and N). Simultaneously 20 replicates at 0×LoD were tested for both ORF1ab and N. LoD was confirmed for ORF1ab and N independently, as described in Table 4 below.

Phase II LoD Sample Replicates

| | Viral copies | Viral copies | Pre-LoD | # of |
|---|---|---|---|---|
| Target | (cp/μL eluate RNA) | (cp/μL VTM) | estimate | Samples |
| ORF1ab | 45 | 6.75 | 1.5x | 20 |
| ORF1ab | 30 | 4.5 | 1x | 20 |
| N | 9 | 1.35 | 1.5x | 20 |
| N | 6 | 0.9 | 1x | 20 |
| ORF1ab/N | 0 | 0 | 0x | 20 |

[0164] Five operators each performed nucleic acid extraction on 20 samples, and eluted purified RNA in 30 μL of water.
[0165] Each operator prepared three 2×RT-LAMP mixes (one for each target: ORF1ab, N, RNase P), enough for 20 samples and 2 controls, and aliquoted 12 μL into strip tubes.
[0166] Operators added 8 uL of eluted RNA to corresponding strip tubes and incubated the LAMP reaction for 40 minutes at 61° C.
[0167] Each operator prepared three CRISPR-Cas mixes (one for each target: ORF1ab, N, RNase P), containing the corresponding CRISPR guide RNA (crRNA), and aliquoted 20 μL into strip tubes.
[0168] Operators added 5 uL of completed LAMP reaction to corresponding Cas reaction strip tubes, mixed briefly, and transferred 20 uL of Cas-LAMP reaction to a 384 Corning Black Clear Bottom Well Plate.
[0169] Operators sealed the Cas plate and placed into a plate reader at 37° C. and relative fluorescent signal intensity data was collected at 2.5-minute intervals for a total of 10 minutes or 15 minutes.

Results interpretation deviation

| Result | Protocol criteria | Study criteria |
|---|---|---|
| Valid Positive | $\frac{{N}_{t = 15}^{spc}}{{N}_{t = 15}^{ntc}} \geq 5 ,$ | $\frac{{N}_{t = 10}^{spc}}{{N}_{t = 10}^{ntc}} \geq 5 ,$ |
| | $\frac{{O}_{t = 15}^{spc}}{{O}_{t = 15}^{ntc}} \geq 5$ | $\frac{{O}_{t = 10}^{spc}}{{O}_{t = 10}^{ntc}} \geq 5$ |
| Valid Negative | $\frac{{N}_{t = 15}^{ntc}}{{N}_{t = 0}^{ntc}} < 3 ,$ | $\frac{{N}_{t = 10}^{ntc}}{{N}_{t = 0}^{ntc}} < 3 ,$ |
| | $\frac{{O}_{t = 15}^{ntc}}{{O}_{t = 0}^{ntc}} < 3 ,$ | $\frac{{O}_{t = 10}^{ntc}}{{O}_{t = 0}^{ntc}} < 3 ,$ |
| | $\frac{{R}_{t = 15}^{ntc}}{{R}_{t = 0}^{ntc}} < 3$ | $\frac{{R}_{t = 10}^{ntc}}{{R}_{t = 0}^{ntc}} < 3$ |
| Positive for COVID-19 | $\frac{{N}_{t = 15}}{{N}_{t = 15}^{ntc}} \geq 5 OR$ | $\frac{{N}_{t = 10}}{{N}_{t = 10}^{ntc}} \geq 5 OR$ |
| | $\frac{{O}_{t = 15}}{{O}_{t = 15}^{ntc}} \geq 5$ | $\frac{{O}_{t = 10}}{{O}_{t = 10}^{ntc}} \geq 5$ |
| Negative for COVID-19 | $\frac{{N}_{t = 15}}{{N}_{t = 15}^{ntc}} < 5 AND$ | $\frac{{N}_{t = 10}}{{N}_{t = 10}^{ntc}} < 5 AND$ |
| | $\frac{{O}_{t = 15}}{{O}_{t = 15}^{ntc}} < 5 AND$ | $\frac{{O}_{t = 10}}{{O}_{t = 10}^{ntc}} < 5 AND$ |
| | $\frac{{R}_{t = 15}}{{R}_{t = 15}^{ntc}} \geq 5$ | $\frac{{R}_{t = 10}}{{R}_{t = 10}^{ntc}} \geq 5$ |
| Invalid | $\frac{{N}_{t = 15}}{{N}_{t = 15}^{ntc}} < 5 AND$ | $\frac{{N}_{t = 10}}{{N}_{t = 10}^{ntc}} < 5 AND$ |
| | $\frac{{O}_{t = 15}}{{O}_{t = 15}^{ntc}} < 5 AND$ | $\frac{{O}_{t = 10}}{{O}_{t = 10}^{ntc}} < 5 AND$ |
| | $\frac{{R}_{t = 15}}{{R}_{t = 15}^{ntc}} < 5$ | $\frac{{R}_{t = 10}}{{R}_{t = 10}^{ntc}} < 5$ |

| | | |
|---|---|---|
| where, | N = | N target reaction fluorescence |
| | O = | Orf1ab target reaction fluorescence |
| | R = | RNaseP target reaction fluorescence |
| | N^{spc} = | N target positive control reaction fluorescence |
| | O^{spc} = | Orf1ab target positive control reaction fluorescence |
| | N^{ntc} = | N target negative control reaction fluorescence |
| | O^{ntc} = | Orf1ab target negative control reaction fluorescence |
| | R^{ntc} = | RNaseP target negative control reaction fluorescence |
| | t = | reaction time |

[0170] This protocol deviation does not change the interpretation of any contrived sample or control result.

### 3. Analysis & Discussion:

[0171] Phase 1 LoD
[0172] LoD Estimation: Values in Tables 4 to 6 for individual replicate results represent fold increase of indicated target over that of the No Template Control (NTC) at T10. A sample was considered positive for the target if that fold-increase is greater than or equal to 5. The LoD is estimated to be the lowest concentration that is detected as positive for the Sherlock™ CRISPR SARS-CoV-2 assay and kit's target analytes (e.g. N and ORF1ab) in 3/3 replicate samples. A LoD estimation was independently determined for the ORF1ab target (Table 4) and the N target (Table 5). Estimated LoD concentrations that were used in Phase II, LoD confirmation, are shown in Table 4 (ORF1ab) and Table 5 (N) below.

TABLE 4
Summary of ORF1AB LoD Estimation

| Viral Copies | | | ORF1AB | | | |
|---|---|---|---|---|---|---|
| (copies/μL | pre-LoD | | | | | Total |
| extracted RNA) | estimate | | rep 1 | rep 2 | rep 3 | Positive |
| 120 | 5x | LoD | 35.0 | 44.2 | 55.8 | 3/3 |
| 72 | 3x | LoD | 28.7 | 41.2 | 59.4 | 3/3 |
| 48 | 2x | LoD | 28.4 | 42.7 | 56.0 | 3/3 |
| 42 | 1.75x | LoD | 35.9 | 43.9 | 59.4 | 3/3 |
| 36 | 1.5x | LoD | 31.0 | 1.2 | 58.2 | 2/3 |
| 30 | 1.25x | LoD | 41.6 | 44.2 | 57.7 | 3/3 |
| 24 | 1x | LoD | 38.2 | 1.1 | 1.1 | 1/3 |
| 18 | 0.75x | LoD | 36.8 | 36.5 | 65.8 | 3/3 |
| 12 | 0.5x | LoD | 1.3 | 43.0 | 1.0 | 1/3 |
| 6 | 0.25x | LoD | 1.1 | 42.9 | 1.0 | 1/3 |
| 0 | 0x | LoD | 1.0 | 1.1 | 1.1 | 0/3 |

| | | | | | |
|---|---|---|---|---|---|
| n/a | Positive Control | 28.5 | 40.0 | 57.9 | 3/3 |
| n/a | Negative Control | 1.0 | 1.0 | 1.0 | 0/3 |

TABLE 5
Summary of N LoD Estimation

| Viral Copies | | | N | | | |
|---|---|---|---|---|---|---|
| (copies/μL | pre-LoD | | | | | Total |
| extracted RNA) | estimate | | rep 1 | rep 2 | rep 3 | Positive |
| 120 | 5x | LoD | 65.5 | 5.6 | 36.9 | 2/3 |
| 72 | 3x | LoD | 66.0 | 19.0 | 38.2 | 3/3 |
| 48 | 2x | LoD | 60.6 | 19.3 | 36.5 | 3/3 |
| 42 | 1.75x | LoD | 57.4 | 17.7 | 37.2 | 3/3 |
| 36 | 1.5x | LoD | 55.5 | 16.4 | 36.1 | 3/3 |
| 30 | 1.25x | LoD | 55.4 | 18.8 | 38.5 | 3/3 |
| 24 | 1x | LoD | 58.0 | 20.1 | 35.7 | 3/3 |
| 18 | 0.75x | LoD | 49.0 | 21.7 | 42.6 | 3/3 |
| 12 | 0.5x | LoD | 51.5 | 19.1 | 39.8 | 3/3 |
| 6 | 0.25x | LoD | 50.1 | 18.8 | 35.3 | 3/3 |
| 0 | 0x | LoD | 0.8 | 0.9 | 1.0 | 0/3 |

| | | | | | |
|---|---|---|---|---|---|
| n/a | Positive Control | 44.5 | 18.0 | 34.9 | 3/3 |
| n/a | Negative Control | 1.8 | 1.2 | 1.1 | 0/3 |

TABLE 6
RNaseP extraction control summary for LoD Estimation

| Viral Copies | | | RNaseP | | | |
|---|---|---|---|---|---|---|
| (copies/μL | pre-LoD | | | | | Total |
| extracted RNA) | estimate | | rep 1 | rep 2 | rep 3 | Positive |
| 120 | 5x | LoD | 22.2 | 29.8 | 32.9 | 3/3 |
| 72 | 3x | LoD | 23.3 | 28.8 | 33.5 | 3/3 |
| 48 | 2x | LoD | 24.3 | 25.2 | 30.4 | 3/3 |
| 42 | 1.75x | LoD | 24.4 | 12.7 | 31.9 | 3/3 |
| 36 | 1.5x | LoD | 24.1 | 24.6 | 30.0 | 3/3 |
| 30 | 1.25x | LoD | 22.3 | 24.7 | 27.3 | 3/3 |
| 24 | 1x | LoD | 28.7 | 22.7 | 30.5 | 3/3 |
| 18 | 0.75x | LoD | 29.8 | 20.3 | 31.9 | 3/3 |
| 12 | 0.5x | LoD | 26.1 | 22.9 | 33.0 | 3/3 |
| 6 | 0.25x | LoD | 24.5 | 26.3 | 31.7 | 3/3 |
| 0 | 0x | LoD | 20.5 | 24.9 | 29.8 | 3/3 |

| | | | | | |
|---|---|---|---|---|---|
| n/a | Negative Control | 1.1 | 1.3 | 1.3 | 0/3 |

[0173] In Phase II, 1×LoD ORF1ab (30 copies/μL extracted RNA) and 1.5×LoD ORF1ab (45 copies/nd extracted RNA) were examined to confirm the LoD by running 20 replicates each. For the N target 1×LoD (6 copies/μL extracted RNA) and 1.5×LoD N (9 copies/μL extracted RNA) were examined to confirm the LoD by running 20 replicates of each, Table 7 below. The LoD was confirmed when ≥19/20 replicates for each of the CRISPR SARS-CoV-2 Assay target analytes was positive for SARS-CoV-2 detection, Table 8 below.

TABLE 7
Results for 1x and 1.5x LoD (ORF1ab and N)

| Viral Copies | | | | | Individual Target Result - | | |
|---|---|---|---|---|---|---|---|
| (copies/μL | | Viral Copies | | pre-LoD | # positive/# replicates | | |
| extracted RNA) | | (copies/μL VTM) | | estimate | ORF1AB | N | RNaseP |
| 45 | (ORF1ab) | 6.75 | (ORF1ab) | 1.5x | 19/20 | 20/20 | 20/20 |
| 9 | (N) | 1.35 | (N) | | | | |
| 30 | (ORF1ab) | 4.5 | (ORF1ab) | 1x | 17/20 | 17/20 | 20/20 |
| 6 | (N) | 0.9 | (N) | | | | |

| | | | | | |
|---|---|---|---|---|---|
| n/a | n/a | Positive | 5/5 | 5/5 | n/a |
| | | Control | | | |
| n/a | n/a | NTC | 0/5 | 0/5 | 0/5 |

TABLE 8
Confirmation of the LoD

| | Viral | | | | | |
|---|---|---|---|---|---|---|
| | copies | Viral | | | | |
| | (cp/μL | copies | | | | |
| | eluate | (cp/μL | Pre-LoD | # of | # of | Detection |
| Target | RNA) | VTM) | estimate | Samples | Detected | Rate (%) |
| ORF1ab | 45 | 6.75 | 1.5× | 20 | 19 | 95 |
| N | 9 | 1.35 | 1.5× | 20 | 20 | 100 |

### 4. Conclusions and Recommendations:

[0174] The acceptance criteria for confirmation of LoD was met when ≥19/20 replicates were positive for ORF1ab and N targets. The confirmed LoD for the Sherlock™ CRISPR SARS-CoV-2 assay and kit's N target analyte was determined to be:
[0175] 9 viral copies/μL extracted RNA
[0176] 1.35 viral copies/μL VTM sample

[0177] The confirmed LoD for the Sherlock™ CRISPR SARS-CoV-2 assay and kit's ORF1ab target analyte was determined to be:
[0178] 45 viral copies/μL extracted RNA
[0179] 6.75 viral copies/μL VTM sample

### Example 4. Clinical Evaluation of the Assay Using Contrived Clinical Samples

### 1. Abstract (Summarized Procedure & Results):

[0180] In the absence of true clinical samples, the clinical evaluation was performed on contrived positive and negative samples, following the procedure specified in PRO-100-0027 Rev 02, Clinical Evaluation for the Sherlock™ CRISPR SARS-CoV-2 Assay Using Contrived Clinical Samples. Nasopharyngeal swab samples confirmed to be negative for COVID-19 by the CDC/New York State Department of Health RT-qPCR primer/probe set (LVD SOP-151.0) were used either unaltered, or spiked with extracted, quantitated SARS-CoV-2 viral RNA to create contrived negative and positive samples, respectively. A total of 30 contrived positive samples spanning 2×, 3×, and 5× the LoD of the Sherlock CRISPR SARS-CoV-2 assay and kit's orf1ab target analyte and 30 contrived negative samples were processed using the Sherlock CRISPR SARS-CoV-2 Test to determine positive percent agreement (sensitivity) and negative percent agreement (specificity) of the test.

### 2. Purpose:

[0181] Determine the positive percent agreement (sensitivity) and negative percent agreement (specificity) performance of the Sherlock™ CRISPR SARS-CoV-2 Test using contrived clinical specimens.

### 3. Test Method:

[0182] a. Test Object:

[0183] Viral genomic RNA from a viral culture of SARS-CoV-2 (stabilized in Trizol) was purified using PureLink™ Viral DNA/RNA Mini Kit and eluted in 60 μL of nuclease-free water. After quantifying eluted RNA via two independent digital PCR experiments, the concentrated RNA was diluted to 48,000 cp/μL. This stock of viral RNA was serially diluted in water to create a range of concentrations.

[0184] Contrived positive samples were generated by spiking viral dilutions into lysed nasopharyngeal matrix. Distinct nasopharyngeal swab matrix clinical specimens were used to create contrived clinical samples for this study. All clinical NP swab samples were screened by RT-qPCR for the presence of SARS-CoV-2 using the CDC/New York State Department of Health RT-qPCR primer/probe set for N1, N2 and RNaseP. All NP swab samples used were confirmed to be negative for SARS-CoV-2 N1 and N2 target and positive for RNase P.

[0185] Contrived “Negative” clinical samples were taken from unique NP swab samples, screened by RT-qPCR for the presence of SARS-CoV-2 using the CDC/New York State Department of Health RT-qPCR primer/probe set for N1, N2 and RNaseP. (LVD SOP-151.0), and confirmed to be negative for SARS-CoV-2 N1 and N2 target and positive for RNase P, and used unaltered for this study.

[0186] Controls: As described in the LoD Protocol PRO-100-0004 Rev 01, every experimental run of LAMP to Cas reactions contained a positive control for both CoV targets (previously extracted viral RNA at 4,800 copies/μL added directly to the LAMP reaction mix) as well as a negative “no RNA added” control (NTC).

[0187] b. Equipment/Instrumentation:

[0188] Equipment and instrumentation used in the study are listed in Table 9 below.

| Name | Manufacturer | Model # |
|---|---|---|
| Plate Reader | BioTek | NEO2 |
| Thermocycler | Analytika | Biometra TRIO |
| Thermocycler | Analytika | Biometra TONE |
| Microcentrifuge | Axygen | Axyspin R |
| Microcentrifuge | Ohaus | FC5513 |
| Microcentrifuge | Ohaus | FC5513 |
| Dry Bath/Heat Block | Corning | LSE |

[0189] Summary of Protocol Steps:
[0190] Samples at ORF1ab LoD concentrations of 0×, 2×, 3×, and 5× (corresponding to 0, 90, 135 and 225 viral copies/μL extracted viral RNA) were tested to determine sensitivity and specificity performance.
[0191] Five operators each performed nucleic acid extraction on 12 samples, and eluted purified RNA in 30 μL of nuclease-free water.
[0192] Each operator prepared three 2×RT-LAMP mixes (one for each target: orf1ab, N, RNase P), enough for 12 samples and 2 controls, and aliquoted 12 μL into 8-well strip tubes.
[0193] Operators added 8 μL of eluted RNA to corresponding 8-well strip tubes and incubated LAMP reaction for 40 minutes at 61° C.
[0194] Each operator prepared three CRISPR-Cas mixes (one for each target: orf1ab, N, RNase P) containing the corresponding CRISPR guide RNA (crRNA), and aliquoted 20 μL into 8-well strip tubes.
[0195] Operators sealed the Cas plate and placed into a plate reader at 37° C. and relative fluorescent signal intensity, caused by cleavage of RNase Alert upon CRISPR complex activation, data was collected at 2.5-minute intervals for a total of 10 minutes or 15 minutes.

TABLE 10
Results interpretation deviation

| Result | Protocol criteria | Study criteria |
|---|---|---|
| Valid Positive | $\frac{{N}_{t = 15}^{spc}}{{N}_{t = 15}^{ntc}} \geq 5 ,$ | $\frac{{N}_{t = 10}^{spc}}{{N}_{t = 10}^{ntc}} \geq 5 ,$ |
| | $\frac{{O}_{t = 15}^{spc}}{{O}_{t = 15}^{ntc}} \geq 5$ | $\frac{{O}_{t = 10}^{spc}}{{O}_{t = 10}^{ntc}} \geq 5$ |
| Valid Negative | $\frac{{N}_{t = 15}^{ntc}}{{N}_{t = 0}^{ntc}} < 3 ,$ | $\frac{{N}_{t = 10}^{ntc}}{{N}_{t = 0}^{ntc}} < 3 ,$ |
| | $\frac{{O}_{t = 15}^{ntc}}{{O}_{t = 0}^{ntc}} < 3 ,$ | $\frac{{O}_{t = 10}^{ntc}}{{O}_{t = 0}^{ntc}} < 3 ,$ |
| | $\frac{{R}_{t = 15}^{ntc}}{{R}_{t = 0}^{ntc}} < 3$ | $\frac{{R}_{t = 10}^{ntc}}{{R}_{t = 0}^{ntc}} < 3$ |
| Positive for COVID-19 | $\frac{{N}_{t = 15}}{{N}_{t = 15}^{ntc}} \geq 5 OR$ | $\frac{{N}_{t = 10}}{{N}_{t = 10}^{ntc}} \geq 5 OR$ |
| | $\frac{{O}_{t = 15}}{{O}_{t = 15}^{ntc}} \geq 5$ | $\frac{{O}_{t = 10}}{{O}_{t = 10}^{ntc}} \geq 5$ |
| Negative for COVID-19 | $\frac{{N}_{t = 15}}{{N}_{t = 15}^{ntc}} < 5 AND$ | $\frac{{N}_{t = 10}}{{N}_{t = 10}^{ntc}} < 5 AND$ |
| | $\frac{{O}_{t = 15}}{{O}_{t = 15}^{ntc}} < 5 AND$ | $\frac{{O}_{t = 10}}{{O}_{t = 10}^{ntc}} < 5 AND$ |
| | $\frac{{RP}_{t = 15}}{{RP}_{t = 15}^{ntc}} \geq 5$ | $\frac{{RP}_{t = 10}}{{RP}_{t = 10}^{ntc}} \geq 5$ |
| Invalid | $\frac{{N}_{t = 15}}{{N}_{t = 15}^{ntc}} < 5 AND$ | $\frac{{N}_{t = 10}}{{N}_{t = 10}^{ntc}} < 5 AND$ |
| | $\frac{{O}_{t = 15}}{{O}_{t = 15}^{ntc}} < 5 AND$ | $\frac{{O}_{t = 10}}{{O}_{t = 10}^{ntc}} < 5 AND$ |
| | $\frac{{R}_{t = 15}}{{R}_{t = 15}^{ntc}} < 5$ | $\frac{{RP}_{t = 10}}{{RP}_{t = 10}^{ntc}} < 5$ |

| | | |
|---|---|---|
| where, | N = | N target reaction fluorescence |
| | O = | Orf1ab target reaction fluorescence |
| | RP = | RNaseP target reaction fluorescence |
| | N^{spc} = | N target positive control reaction fluorescence |
| | O^{spc} = | Orf1ab target positive control reaction fluorescence |
| | N^{ntc} = | N target negative control reaction fluorescence |
| | O^{ntc} = | Orf1ab target negative control reaction fluorescence |
| | R^{ntc} = | RNaseP target negative control reaction fluorescence |
| | t = | reaction time |

[0196] This protocol changes the analysis of sample #10 from the following at n=15 minutes:

$$\frac{{N}_{t = 15}}{{N}_{t = 15}^{n t c}} = 1.3 , \frac{{O}_{t = 15}}{{O}_{t = 15}^{n t c}} = 8.2 , \frac{R {P}_{t = 15}}{R {P}_{t = 15}^{n t c}} = 56.3$$

[0197] to the following at n=10 minutes:

$$\frac{{N}_{t = 10}}{{N}_{t = 10}^{n t c}} = 1.2 , \frac{{O}_{t = 10}}{{O}_{t = 10}^{n t c}} = 4.8 , \frac{R {P}_{t = 10}}{R {P}_{t = 10}^{n t c}} = 59.3$$

[0198] This protocol deviation results in a more accurate interpretation of sample #10 being a true negative rather than a weak false positive. This protocol deviation does not change the interpretation of any other contrived sample or control result.

### 4. Detailed Test Results (Data):

[0199] Ratio calculations for all samples are included in Tables 11-13 below.

TABLE 11
Orf1AB target fluorescence ratios

| | Viral copies | | | | | | |
|---|---|---|---|---|---|---|---|
| | per μL | | | | | | |
| | extracted | Sample | | | | | |
| Sample | RNA | type | rep 1 | rep 2 | rep 3 | rep 4 | rep 5 |
| 1 | 0 | NS | 0.9 | 1.0 | 0.6 | 1.0 | 0.9 |
| 2 | 0 | NS | 1.2 | 1.0 | 0.7 | 1.0 | 0.9 |
| 3 | 90 | 2× | 101.1 | 28.3 | 18.6 | 59.2 | 43.6 |
| 4 | 225 | 5× | 105.9 | 28.6 | 22.1 | 55.1 | 45.3 |
| 5 | 0 | NS | 1.2 | 1.0 | 1.0 | 1.1 | 0.9 |
| 6 | 0 | NS | 1.2 | 0.9 | 1.0 | 1.1 | 0.9 |
| 7 | 90 | 2× | 118.3 | 28.1 | 25.1 | 54.6 | 47.5 |
| 8 | 0 | NS | 1.0 | 0.9 | 1.0 | 1.1 | 0.9 |
| 9 | 135 | 3× | 106.2 | 33.4 | 27.3 | 52.5 | 50.8 |
| 10 | 0 | NS | 1.0 | 1.1 | 4.8 | 1.0 | 1.0 |
| 11 | 90 | 2× | 93.3 | 29.4 | 24.5 | 50.9 | 42.5 |
| 12 | 90 | 2× | 83.2 | 30.1 | 24.5 | 50.7 | 44.3 |
| | | Positive | 99.6 | 30.9 | 22.6 | 48.1 | 53.6 |
| | | Control | | | | | |
| | | Negative | 1.1 | 1.1 | 1.1 | 1.0 | 1.1 |
| | | Control | | | | | |

TABLE 12
N target fluorescence ratios

| | Viral copies | | | | | | |
|---|---|---|---|---|---|---|---|
| | per μL | | | | | | |
| | extracted | Sample | | | | | |
| Sample | RNA | type | rep 1 | rep 2 | rep 3 | rep 4 | rep 5 |
| 1 | 0 | NS | 1.1 | 0.9 | 1.3 | 1.1 | 0.8 |
| 2 | 0 | NS | 1.2 | 0.9 | 1.5 | 1.0 | 0.9 |
| 3 | 90 | 2× | 69.1 | 45.4 | 71.3 | 49.1 | 20.4 |
| 4 | 225 | 5× | 62.6 | 44.0 | 55.6 | 36.0 | 23.0 |
| 5 | 0 | NS | 1.1 | 0.8 | 1.3 | 1.1 | 0.9 |
| 6 | 0 | NS | 1.3 | 0.8 | 1.4 | 1.2 | 0.9 |
| 7 | 90 | 2× | 72.3 | 42.4 | 72.0 | 44.9 | 23.6 |
| 8 | 0 | NS | 1.2 | 0.6 | 1.3 | 1.2 | 0.9 |
| 9 | 135 | 3× | 67.2 | 57.5 | 69.2 | 39.5 | 23.7 |
| 10 | 0 | NS | 1.5 | 1.0 | 1.2 | 1.1 | 1.0 |
| 11 | 90 | 2× | 62.9 | 44.1 | 65.9 | 34.0 | 22.2 |
| 12 | 90 | 2× | 67.2 | 47.6 | 54.8 | 36.2 | 22.2 |
| | | Positive | 61.5 | 45.6 | 70.2 | 30.7 | 20.9 |
| | | Control | | | | | |
| | | Negative | 1.3 | 1.6 | 1.0 | 1.1 | 1.2 |
| | | Control | | | | | |

TABLE 13
RNaseP target fluorescence ratios

| | Viral copies | | | | | | |
|---|---|---|---|---|---|---|---|
| | per μL | | | | | | |
| | extracted | Sample | | | | | |
| Sample | RNA | type | rep 1 | rep 2 | rep 3 | rep 4 | rep 5 |
| 1 | 0 | NS | 28.0 | 34.1 | 42.6 | 29.8 | 10.7 |
| 2 | 0 | NS | 29.2 | 29.1 | 47.2 | 26.1 | 10.8 |
| 3 | 90 | 2× | 29.2 | 24.0 | 41.7 | 1.0 | 10.6 |
| 4 | 225 | 5× | 26.6 | 25.4 | 41.3 | 22.5 | 11.1 |
| 5 | 0 | NS | 30.0 | 26.2 | 44.4 | 26.1 | 10.4 |
| 6 | 0 | NS | 27.2 | 24.8 | 47.7 | 24.0 | 10.6 |
| 7 | 90 | 2× | 30.6 | 24.6 | 55.1 | 26.9 | 10.5 |
| 8 | 0 | NS | 31.5 | 24.5 | 51.8 | 28.3 | 11.3 |
| 9 | 135 | 3× | 32.9 | 51.3 | 64.7 | 24.0 | 9.0 |
| 10 | 0 | NS | 31.5 | 49.1 | 59.3 | 28.4 | 10.8 |
| 11 | 90 | 2× | 25.7 | 41.7 | 33.7 | 23.7 | 7.6 |
| 12 | 90 | 2× | 22.6 | 41.5 | 29.4 | 25.5 | 8.1 |
| | | Negative | 1.3 | 1.3 | 1.3 | 1.3 | 1.0 |
| | | Control | | | | | |

### 5. Analysis & Discussion:

[0200] Values in Tables 11 to 13 for individual contrived samples and controls represent the ratio of fluorescence of indicated target reaction over that of the corresponding negative control reaction at t=10 minutes, with the exception of the Negative Control which represents the ratio of the fluorescence of the negative control reaction at t=10 minutes and t=0 minutes. Results interpretation are described in Table 3 above and summarized in Tables 14 and 15 below. Confidence intervals (95%) were calculated using the Wilson score interval.

TABLE 14
Sherlock CRISPR SARS-CoV-2 Test agreement with
expected results by target concentration

| | Number of | % Agreement |
|---|---|---|
| Sample Concentration | samples | (95% confidence interval) |
| 5x LoD | 5 | 100% |
| | | (NA*) |
| 3x LoD | 5 | 100% |
| | | (NA*) |
| 2x LoD | 20 | 100% |
| | | (83.9%-100%) |
| Negative specimens (NS) | 30 | 100% |
| | | (88.6%-100%) |

NA*, confidence intervals not calculated for sample sizes of 5 or less

TABLE 15
Calculation of PPA and NPA for the
Sherlock CRISPR SARS-CoV-2 Test

| | | Contrived | |
|---|---|---|---|
| | | Reference Samples | |
| | | + | − |
| Sherlock CRISPR SARS-CoV-2 Test Result | + | 30 | 0 |
| | − | 0 | 30 |
| Total | | 30 | 30 |

Positive percent agreement (Sensitivity) = 100%
Negative percent agreement (Specificity) = 100%

### 6. Conclusions and Recommendations:

[0201] Acceptance criteria of the study were met—specifically,
[0202] ≥19/20 replicates for the 2×LoD samples are positive for SARS-CoV-2 detection,
[0203] 10/10 replicates for the combined 3× and 5×LoD samples are positive for SARS-CoV-2 detection, and
[0204] 30/30 replicates of Negative Specimen (NS) samples are negative for SARS-CoV-2 detection
   The positive percent agreement (sensitivity) of the Sherlock SARS-CoV-2 Test is 100% and the negative percent agreement (specificity) of the Sherlock SARS-CoV-2 Test is 100%.

### Example 5 Equipment and Reagents

[0205] The present example provides a list of reagents and equipment useful for performing a Sherlock SARS-CoV-2 Test.

TABLE 16
List of Reaction Reagents

| | | Catalog | Stock | | μL required for | |
|---|---|---|---|---|---|---|
| Reagent | Supplier | Number | Concentration | | 100 reactions | |
| RNAaseP 10x LAMP | Sherlock (see | n/a | 10x | | 200 | μL |
| primer mix | section 7.5.1) | | | | | |
| SARS-CoV-2 N 10x | Sherlock (see | n/a | 10x | | 200 | μL |
| LAMP Primer Mix | section 7.5.1) | | | | | |
| SARS-CoV-2 ORF1AB | Sherlock (see | n/a | 10x | | 200 | μL |
| 10x LAMP Primer Mix | section 7.5.1) | | | | | |
| crRNA | IDT | n/a | 1000 | nM | 56 | μL |
| LwaCas13 enzyme | IDT | n/a | 0.5 | mg/mL | 32 | μL |
| 2x WarmStart RT LAMP | NEB | E1700 | 2X | | 1000 | μL |
| T7 RNA pol | NEB | M0251 | 50 | U/μL | 50 | μL |
| Murine Rnase inhibitor | NEB | M0314 | 40 | U/μL | 62.5 | μL |
| MgCl₂ | ThermoFisher | AM9530G | 1 | M | 23 | μL |
| RNase Alert | IDT | 11-04-03-03 | 2 | μM | 156 | μL |

| | | | | |
|---|---|---|---|---|
| PureLink ™ Viral | ThermoFisher | 12280050 | n/a | n/a |
| RNA/DNA Mini Kit | | | | |

TABLE 17
List of LAMP primer and crRNA sequences

| Target | Description | Sequence |
|---|---|---|
| orf1ab | orf1ab-F3 | TGAAAATAGGACCTGAGCG |
| | | (SEQ ID NO. 72) |
| | orf1ab-B3 | ACACCTAGTCATGATTGCA |
| | | (SEQ ID NO. 73) |
| | orf1ab-FIP | CCAATAGAATGATGCCAACA |
| | | GGCGATAGACGTGCCACATG |
| | | C |
| | | (SEQ ID NO. 74) |
| | orf1ab-BIP | GATTGATGTTCAACAATGGG |
| | | GTTTCATTACCATGGACTTG |
| | | ACAAT |
| | | (SEQ ID NO. 75) |
| | orf1ab- | gaaatTAATACGACTCACTA |
| | LF-T7 | TAGGGAAGTGTCTGAAGCAG |
| | | TGGAAAA |
| | | (SEQ ID NO. 76) |
| | crRNA | gatttagactaccccaaaaa |
| | | cgaaggggactaaaacGATC |
| | | ATGGTTGCTTTGTAGGTTAC |
| | | CTGT |
| | | (SEQ ID NO. 77) |
| N | N-5F3 | GCTTCTACGCAGAAGGGA |
| | | (SEQ ID NO. 78) |
| | N-5B3 | GTGACAGTTTGGCCTTGT |
| | | (SEQ ID NO. 79) |
| | N-5FIP | TACTGCTGCCTGGAGTTGAA |
| | | TTCCTCTTCTCGTTCCTCAT |
| | | C |
| | | (SEQ ID NO. 80) |
| | N-5BIP | GCTTTGCTGCTGCTTGACAG |
| | | TGTTGTTGGCCTTTACCA |
| | | (SEQ ID NO. 81) |
| | N-5LB | ATTGAACCAGCTTGAGAGCA |
| | | AA |
| | | (SEQ ID NO. 82) |
| | N-5LF-T7 | gaaatTAATACGACTCACTA |
| | | TAGGGCTTGAACTGTTGCGA |
| | | CTACGT |
| | | (SEQ ID NO. 83) |
| | crRNA | gatttagactaccccaaaaa |
| | | cgaaggggactaaaacGGTG |
| | | ATGCTGCTCTTGCTTTGCTG |
| | | CTGC |
| | | (SEQ ID NO. 84) |
| RNaseP | RP-F3 | TTGATGAGCTGGAGCCA |
| POP7* | | (SEQ ID NO. 85) |
| | RP-B3 | CACCCTCAATGCAGAGTC |
| | | (SEQ ID NO. 86) |
| | RP-FIP | GTGTGACCCTGAAGACTCGG |
| | | TTTTAGCCACTGACTCGGAT |
| | | C |
| | | (SEQ ID NO. 87) |
| | RP-BIP | CCTCCGTGATATGGCTCTTC |
| | | GTTTTTTTCTTACATGGCTC |
| | | TGGTC |
| | | (SEQ ID NO. 88) |
| | RP-LF | ATGTGGATGGCTGAGTTGTT |
| | | (SEQ ID NO. 89) |
| | RP-LB-T7 | GAATTAATACGACTCACTAT |
| | | AGGGCATGCTGAGTACTGGA |
| | | CCTC |
| | | (SEQ ID NO. 90) |
| | crRNA | gatttagactaccccaaaaa |
| | | cgaaggggactaaaacAGTG |
| | | GAGGAGTGTCTTTTCAATTA |
| | | CTTG |
| | | (SEQ ID NO. 91) |

* RNaseP POP7 LAMP primers published in Curtis et al. (2018) J Virol Methods. 255:91-97

TABLE 18
List of Additional Materials & Supplies
Name

0.2 mL strip tubes
1.5 mL snap cap tubes
Molecular grade water (DNase/RNase free)
Filter pipette tips
384 Corning Black Clear Bottom Low Volume Plate
Plate Optical Seal
Extracted RNA from clinical sample/synthetic RNA target
Serological Pipettes

TABLE 19
List of Equipment/Instrumentation

| Item | Manufacturer | Model Number | SHLK# |
|---|---|---|---|
| Microcentrifuge | Axygen | Axyspin R | SHLK-0031 |
| Microcentrifuge | Ohaus | — | SHLK-0033 |
| PCR Workstation-Dead Air Box | Air Clean | AC632DBC | SHLK-0034 |
| PCR Workstation | Air Clean | AC648DBC | SHLK-0035 |
| PCR Workstation | Air Clean | AC648DBC | SHLK-0036 |
| PCR Workstation | Air Clean | AC648DBC | SHLK-0037 |
| PCR Workstation-Dead Air Box | Air Clean | AC632DBC | SHLK-0038 |
| PCR Workstation-Dead Air Box | Air Clean | AC632DBC | SHLK-0039 |
| PCR Workstation | Air Clean | AC648DBC | SHLK-0040 |
| PCR Workstation-Dead Air Box | Air Clean | AC632DBC | SHLK-0041 |
| Plate Reader | BioTek | NEO2 | SHLK-0045 |
| Plate Reader | BioTek | NEO2 | SHLK-0046 |
| Dry Bath/Heat Block | Corning | LSE | SHLK-0047 |
| PCR Workstation-Dead Air Box | Air Clean | AC632DBC | SHLK-0051 |
| PCR Workstation | Air Clean | AC648DBC | SHLK-0052 |
| PCR Machine (3x 48well) | Analytika | Biometra TRIO | SHLK-0056 |
| Biosafety Cabinet Class II Type A2 4 ft | Baker | Sterilgard III | SHLK-0057 |
| Biosafety Cabinet Class II Type A2 4 ft | PHCBI | NHE-N4002A | SHLK-0058 |
| Biosafety Cabinet Class II Type A2 4 ft | PHCBI | NHE-N4002A | SHLK-0059 |
| PCR Workstation | Air Clean | AC648DBC | SHLK-0060 |
| PCR Workstation-Dead Air Box | Air Clean | AC632DBC | SHLK-0061 |
| PCR Workstation | Air Clean | AC648DBC | SHLK-0062 |
| Plate Reader | BioTek | NEO2 | SHLK-0063 |
| PCR Machine (3x 48well) | Analytika | Biometra TRIO | SHLK-0067 |
| PCR Machine (1x 96well) | Analytika | Biometra TONE | SHLK-0068 |
| Tabletop Centrifuge | Beckman | Avanti J15 | SHLK-0069 |
| Biosafety Cabinet Class II Type A2 6 ft | NuAire | NU-425-600 | SHLK-0070 |
| Biosafety Cabinet Class II Type A2 4 ft | NuAire | NU-425-400 | SHLK-0071 |
| PCR Machine (1x 96well) | Analytika | Biometra TONE | SHLK-0072 |
| Microcentrifuge | Ohaus | FC5513 | SHLK-0073 |
| RODI Water Purification System | EMD-Millipore | Milli-Q | SHLK-0075 |
| Vortex | Corning | 6775 | SHLK-0086 |
| Vortex | Ohaus | VXMNAL | SHLK-0087 |
| Minifuge | Ohaus | FC5306 | SHLK-0088 |
| Minifuge | Ohaus | FC5306 | SHLK-0089 |
| Minifuge | Ohaus | FC5306 | SHLK-0090 |
| Minifuge | Ohaus | FC5306 | SHLK-0091 |
| Minifuge | Ohaus | FC5306 | SHLK-0092 |
| Minifuge | Ohaus | FC5306 | SHLK-0093 |
| Minifuge | Ohaus | FC5306 | SHLK-0094 |
| Vortex | Ohaus | VXMNAL | SHLK-0095 |
| Vortex | Ohaus | VXMNAL | SHLK-0096 |
| Vortex | Ohaus | VXMNAL | SHLK-0097 |
| Vortex | Ohaus | VXMNAL | SHLK-0098 |
| Vortex | Ohaus | VXMNAL | SHLK-0099 |
| Vortex | Ohaus | VXMNAL | SHLK-0100 |
| Vortex | Corning | 6775 | SHLK-0101 |
| Vortex | Corning | 6775 | SHLK-0102 |
| Vortex | Corning | 6775 | SHLK-0103 |
| Vortex | Corning | 6775 | SHLK-0104 |
| Minifuge | Corning | 6770 | SHLK-0105 |
| Minifuge | Corning | 6770 | SHLK-0106 |
| Minifuge | Corning | 6770 | SHLK-0107 |
| Vortex | Ohaus | VXMNAL | SHLK-0115 |
| Minifuge | Ohaus | FC5306 | SHLK-0116 |
| Heatblock | Fisher | 14955218 | SHLK-0117 |
| Heatblock | Fisher | 14955218 | SHLK-0118 |
| Single Channel Pipette, P3 (5 each) | Sartorius | — | — |
| Single Channel Pipette, P10 (5 each) | Sartorius | — | — |
| Single Channel Pipette, P20 (5 each) | Sartorius | — | — |
| Single Channel Pipette, P100 (5 each) | Sartorius | — | — |
| Single Channel Pipette, P200 (5 each) | Sartorius | — | — |
| Single Channel Pipette, P300 (5 each) | Sartorius | — | — |
| Single Channel Pipette, P1000 (5 each) | Sartorius | — | — |
| Multi Channel Pipette M100 (2 each) | Sartorius | — | — |
| Multi Channel Pipette M10 (2 each) | Sartorius | — | — |
| Electronic Pipette E10 (4 each) | Sartorius | — | — |
| Electronic Pipette E100 (4 each) | Sartorius | — | — |
| Electronic Pipette E300 (4 each) | Sartorius | — | — |
| Electronic Pipette E1000 (4 each) | Sartorius | — | — |
| Serological Pipette | | | |

### Example 6 LAMP Primer and Guide Polynucleotide Design

[0206] The present examples describes a process by which LAMP primers and guide polynucleotides were selected for a Sherlock SARS-CoV-2 Test.

[0207] LAMP primers to amplify portions of SARS-CoV-2 were designed using LAMP Primer design software (e.g., PrimerExplorer). Over 80 primer sets covering multiple targets within the SARS-CoV-2 genome were designed. LAMP primers were designed to generate amplicons covering nearly every open reading frame in the SARS-CoV-2 genome including those that are presently used in PCR based SARS-CoV-2 diagnostic or detection systems.

[0208] The sequences of LAMP primers generated are shown in Table 20

TABLE 20

| | | | SEQ |
|---|---|---|---|
| | | | ID |
| Name | Sequences | Note | NO. |
| XL-500 | CAACGTGTTGTAGCTTGTC | b1-F3 | 92 |
| XL-501 | ACCATCAGTAGATAAAAGTGCA | b1-B3 | 93 |
| XL-502 | GAACCGCCACACATGACCATCTATAGATTAGCTAATGAGTGTGCT | b1-FIP | 94 |
| XL-503 | GGTGGAACCTCATCAGGAGATGTAACATTGGCCGTGACAG | b1-BIP | 95 |
| XL-504 | CCACAACTGCTTATGCTAATAGTGT | b1-LB | 96 |
| XL-505 | CGTTTCTATAGATTAGCTAATGAGT | b2-F3 | 97 |
| XL-506 | GGCAATTTTGTTACCATCAGT | b2-B3 | 98 |
| XL-507 | GAGGTTCCACCTGGTTTAACATATAGCTCAAGTATTGAGTGAAATGG | b2-FIP | 99 |
| XL-508 | CAGGAGATGCCACAACTGCTTATAGATAAAAGTGCATTAACATTGG | b2-BIP | 100 |
| XL-509 | TAACATTTGTCAAGCTGTCACGG | b2-LB | 101 |
| XL-510 | ATGGCCTCACTTGTTCTT | b3-F3 | 102 |
| XL-511 | TAACATTGGCCGTGACAG | b3-B3 | 103 |
| XL-512 | ACTTGAGCACACTCATTAGCTAATCGCTCGCAAACATACAACG | b3-FIP | 104 |
| XL-513 | GTCATGTGTGGCGGTTCACTACACTATTAGCATAAGCAGTTG | b3-BIP | 105 |
| XL-514 | ACGGTGTGACAAGCTACAACA | b3-LF | 106 |
| XL-515 | ATGTTAAACCAGGTGGAACCTCATC | b3-LB | 107 |
| XL-516 | GCTCGCAAACATACAACG | b4-F3 | 108 |
| XL-517 | GCATTAACATTGGCCGTG | b4-B3 | 109 |
| XL-518 | ACCATTTCACTCAATACTTGAGCAGTAGCTTGTCACACCGTT | b4-FIP | 110 |
| XL-519 | ATATGTTAAACCAGGTGGAACCTCGCTTGACAAATGTTAAAAACACT | b4-BIP | 111 |
| XL-520 | TCAGGAGATGCCACAACTGCTTAT | b4-LB | 112 |
| XL-521 | CCTAACATGCTTAGAATTATGGC | b5-F3 | 113 |
| XL-522 | TAACATTGGCCGTGACAG | b5-B3 | 114 |
| XL-523 | ACTTGAGCACACTCATTAGCTAATCCACTTGTTCTTGCTCGCA | b5-FIP | 115 |
| XL-524 | GTCATGTGTGGCGGTTCACTCACTATTAGCATAAGCAGTTGT | b5-BIP | 116 |
| XL-525 | GACAAGCTACAACACGTTGTATGTT | b5-LF | 117 |
| XL-526 | TAAACCAGGTGGAACCTCATCA | b5-LB | 118 |
| XL-527 | TGTTCTTGCTCGCAAACA | b6-F3 | 119 |
| XL-528 | TAACATTGGCCGTGACAG | b6-B3 | 120 |
| XL-529 | ACTCAATACTTGAGCACACTCATTATACAACGTGTTGTAGCTTGTC | b6-FIP | 121 |
| XL-530 | ATGGTCATGTGTGGCGGTTCCTATTAGCATAAGCAGTTGTGG | b6-BIP | 122 |
| XL-531 | GTTAAACCAGGTGGAACCTCATC | b6-LB | 123 |
| XL-532 | CAACGTGTTGTAGCTTGTC | b7-F3 | 124 |
| XL-533 | ACCATCAGTAGATAAAAGTGCA | b7-B3 | 125 |
| XL-534 | GGTTTAACATATAGTGAACCGCCACGCTAATGAGTGTGCTCAAGT | b7-FIP | 126 |
| XL-535 | GGTGGAACCTCATCAGGAGATGTAACATTGGCCGTGACAG | b7-BIP | 127 |
| XL-536 | CCACAACTGCTTATGCTAATAGTGT | b7-LB | 128 |
| XL-537 | GCTAATGAGTGTGCTCAAGT | b8-F3 | 129 |
| XL-538 | ACTTATCGGCAATTTTGTTACC | b8-B3 | 130 |
| XL-539 | CCTGATGAGGTTCCACCTGGTGAGTGAAATGGTCATGTGT | b8-FIP | 131 |
| XL-540 | GATGCCACAACTGCTTATGCTGTAGATAAAAGTGCATTAACATTGG | b8-BIP | 132 |
| XL-541 | TAACATTTGTCAAGCTGTCACGG | b8-LB | 133 |
| XL-542 | CATGGCTTTGAGTTGACATC | hk1-F3 | 134 |
| XL-543 | ACCTGTAAAACCCCATTGT | hk1-B3 | 135 |
| XL-544 | ATGTGGCACGTCTATCACATAGATGAAGTATTTTGTGAAAATAGGACC | hk1-FIP | 136 |
| XL-545 | TCCACTGCTTCAGACACTTATGCTGAACATCAATCATAAACGGATT | hk1-BIP | 137 |
| XL-546 | TGATGTTCAACAATGGGGT | hk2-F3 | 138 |
| XL-547 | TTAATCTTCAGTTCATCACCAA | hk2-B3 | 139 |
| XL-548 | GCTACATGTGCATTACCATGGACTTTTACAGGTAACCTACAAAGCAA | hk2-FIP | 140 |
| XL-549 | AGTTGTGATGCAATCATGACTAGGTTTATAGGATATTCAATAGTCCAGTC | hk2-BIP | 141 |
| XL-550 | CCACGAGTGCTTTGTTAAGCG | hk2-LB | 142 |
| XL-551 | CCATGATCTGTATTGTCAAGTC | hk3-F3 | 143 |
| XL-552 | GAACTGGGAATTTGTCTGC | hk3-B3 | 144 |
| XL-553 | CGTGGACAGCTAGACACCTAGCATGGTAATGCACATGTAGC | hk3-FIP | 145 |
| XL-554 | GCGTGTTGACTGGACTATTGAATATAACCATGTGTTGAACCTTTC | hk3-BIP | 146 |
| XL-555 | ATGAACTGAAGATTAATGCGGCTTG | hk3-LB | 147 |
| XL-556 | CATCATTCTATTGGATTTGATTACG | hk4-F3 | 148 |
| XL-557 | TCAATAGTCCAGTCAACACG | hk4-B3 | 149 |
| XL-558 | AGATCATGGTTGCTTTGTAGGTTACAATCCGTTTATGATTGATGTTCA | hk4-FIP | 150 |
| XL-559 | GTCAAGTCCATGGTAATGCACATCTTAACAAAGCACTCGTGG | hk4-BIP | 151 |
| XL-560 | TGTGATGCAATCATGACTAGGTGT | hk4-LB | 152 |
| XL-561 | GTCTATAATCCGTTTATGATTGATG | hk5-F3 | 153 |
| XL-562 | CCGCATTAATCTTCAGTTCAT | hk5-B3 | 154 |
| XL-563 | TACATGTGCATTACCATGGACTTGAAACAATGGGGTITTACAGGTA | hk5-FIP | 155 |
| XL-564 | AGTTGTGATGCAATCATGACTAGGTTTATAGGATATTCAATAGTCCAGTC | hk5-BIP | 156 |
| XL-565 | CAGATCATGGTTGCTTTGTAGGT | hk5-LF | 157 |
| XL-566 | AGCTGTCCACGAGTGCTTT | hk5-LB | 158 |
| XL-567 | ACACTTATGCCTGTTGGC | hk6-F3 | 159 |
| XL-568 | ACACGCTTAACAAAGCACT | hk6-B3 | 160 |
| XL-569 | AGGTTACCTGTAAAACCCCATTGTGATTTGATTACGTCTATAATCCGT | hk6-FIP | 161 |
| XL-570 | AAGCAACCATGATCTGTATTGTCATAGACACCTAGTCATGATTGC | hk6-BIP | 162 |
| XL-571 | TGGTAATGCACATGTAGCTAGTTGT | hk6-LB | 163 |
| XL-572 | TGAAAATAGGACCTGAGCG | hk7-F3 | 164 |
| XL-573 | ACACCTAGTCATGATTGCA | hk7-B3 | 165 |
| XL-574 | CCAATAGAATGATGCCAACAGGCGATAGACGTGCCACATGC | hk7-FIP | 166 |
| XL-575 | GATTGATGTTCAACAATGGGGTTTCATTACCATGGACTTGACAAT | hk7-BIP | 167 |
| XL-576 | AAGTGTCTGAAGCAGTGGAAAA | hk7-LF | 168 |
| XL-577 | GGTAACCTACAAAGCAACCATGAT | hk7-LB | 169 |
| XL-578 | AGTCCATGGTAATGCACAT | hk8-F3 | 170 |
| XL-579 | GGGTTACCAATGTCGTGAA | hk8-B3 | 171 |
| XL-580 | GCTTAACAAAGCACTCGTGGAGTAGCTAGTTGTGATGCAATC | hk8-FIP | 172 |
| XL-581 | GATGAACTGAAGATTAATGCGGCTTGAACTGGGAATTTGTCTGC | hk8-BIP | 173 |
| XL-582 | TCAACACATGGTTGTTAAAGCTGCA | hk8-LB | 174 |
| MKW0112 | ATCAGAGGCACGTCAACATC | JP1F3 | 175 |
| MKW0113 | TCACCACTACGACCGTACTG | JP1B3 | 176 |
| MKW0114 | AGGGCTGTTCAAGTTGAGGCAAAGATGGCACTTGTGGCTTAG | JP1FIP | 177 |
| MKW0115 | ACGTTCGGATGCTCGAACTGCATGCCTTCGAGTTCTGCTAC | JP1BIP | 178 |
| MKW0116 | AACGCCTTTTTCAACTTCTA | JP1LF | 179 |
| MKW0117 | AGATGGCACTTGTGGCTTAG | JP2F3 | 180 |
| MKW0118 | CGAAGAAGAACCTTGCGGTA | JP2B3 | 181 |
| MKW0119 | GCAGTTCGAGCATCCGAACGTTGGCGTTTTGCCTCAACTTG | JP2FIP | 182 |
| MKW0120 | TCGAAGGCATTCAGTACGGTCGACTGGTATTTCGCCCACATG | JP2BIP | 183 |
| MKW0121 | GGTGAGACACTTGGTGTCCTTGTC | JP2LB | 184 |
| MKW0122 | CCTCAACTTGAACAGCCCT | JP5F3 | 185 |
| MKW0123 | ACGAAGAAGAACCTTGCGG | JP5B3 | 186 |
| MKW0124 | GCCTTCGAGTTCTGCTACCAGCTCATCAAACGTTCGGATGCT | JP5FIP | 187 |
| MKW0125 | ACGGTCGTAGTGGTGAGACACTTAAGCCACTGGTATTTCGCC | JP5BIP | 188 |
| MKW0126 | TGACCATGAGGTGCAGTTCG | JP5LF | 189 |
| MKW0127 | TGGTGTCCTTGTCCCTCATGT | JP5LB | 190 |
| MKW0128 | CCTCAACTTGAACAGCCCT | JP6F3 | 191 |
| MKW0129 | TATGGCCACCAGCTCCTT | JP6B3 | 192 |
| MKW0130 | CGACCGTACTGAATGCCTTCGACGTTCGGATGCTCGAACTG | JP6FIP | 193 |
| MKW0131 | GACACTTGGTGTCCTTGTCCCTAGAAGAACCTTGCGGTAAGC | JP6BIP | 194 |
| MKW0132 | CATGTGGGCGAAATACCAGTG | JP6LB | 195 |
| MKW0133 | CTTATCAGAGGCACGTCAA | JP9F3 | 196 |
| MKW0134 | TACGACCGTACTGAATGC | JP9B3 | 197 |
| MKW0135 | TCAAGTTGAGGCAAAACGCCTCTTAAAGATGGCACTTGTGG | JP9FIP | 198 |
| MKW0136 | AGCCCTATGTGTTCATCAAACGTTCTTCGAGTTCTGCTACCA | JP9BIP | 199 |
| MKW0137 | TTTTTCAACTTCTACTAAG | JP9LF | 200 |
| MKW0138 | CATCTTAAAGATGGCACTTGT | JP10F3 | 201 |
| MKW0139 | AGTGTCTCACCACTACGA | JP10B3 | 202 |
| MKW0140 | GTTTGATGAACACATAGGGCTGTTGGCTTAGTAGAAGTTGAAAAAGG | JP10FIP | 203 |
| MKW0141 | GTTCGGATGCTCGAACTGCACCGTACTGAATGCCTTCG | JP10BIP | 204 |
| MKW0142 | CAAGTTGAGGCAAAACG | JP10LF | 205 |
| MKW0143 | GATGGCACTTGTGGCTTA | JP11F3 | 206 |
| MKW0144 | AGGACACCAAGTGTCTCA | JP11B3 | 207 |
| MKW0145 | CCGAACGTTTGATGAACACATAGGGTAGAAGTTGAAAAAGGCGT | JP11FIP | 208 |
| MKW0146 | ATGCTCGAACTGCACCTCATCCACTACGACCGTACTGAA | JP11BIP | 209 |
| MKW0147 | GCTGTTCAAGTTGAGGCAAA | JP11LF | 210 |
| MKW0148 | GTAGAAGTTGAAAAAGGCGTT | JP12F3 | 211 |
| MKW0149 | GAAGAAGAACCTTGCGGT | JP12B3 | 212 |
| MKW0150 | ACCATGAGGTGCAGTTCGAGGCCTCAACTTGAACAGCC | JP12FIP | 213 |
| MKW0151 | AGAACTCGAAGGCATTCAGTACGAAGCCACTGGTATTTCGC | JP12BIP | 214 |
| MKW0152 | TCCGAACGTTTGATGAACACATAG | JP12LF | 215 |
| MKW0153 | GTCGTAGTGGTGAGACACTTGG | JP12LB | 216 |
| MKW0154 | TCAAACGTTCGGATGCTC | JP13F3 | 217 |
| MKW0155 | CCAGCTCCTTTATTACCGT | JP13B3 | 218 |
| MKW0156 | CGTACTGAATGCCTTCGAGTTCTGAACTGCACCTCATGGTC | JP13FIP | 219 |
| MKW0157 | GTCGTAGTGGTGAGACACTTGGACGAAGAAGAACCTTGCG | JP13BIP | 220 |
| MKW0158 | GCTACCAGCTCAACCATAACAT | JP13LF | 221 |
| MKW0159 | CTTGTCCCTCATGTGGGCGAA | JP13LB | 222 |
| XL-600 | TGTTATGGAGTGTCTCCTACT | LnS1-F3 | 223 |
| XL-601 | CCAACCTTAGAATCAAGATTGT | LnS1-B3 | 22 |
| XL-602 | CGATTTGTCTGACTTCATCACCTCTAAATGATCTCTGCTTTACTAATGTC | LnS1-FIP | 225 |
| XL-603 | CTCCAGGGCAAACTGGAAAGCAAGCTATAACGCAGCCT | LnS1-BIP | 226 |
| XL-604 | CAACAGAATCTATTGTTAGATTTCC | LnS2-F3 | 227 |
| XL-605 | AGACATTAGTAAAGCAGAGATCA | LnS2-B3 | 228 |
| XL-606 | TTCTCTTCCTGTTCCAAGCATAAACCTTTTGGTGAAGTTTTTAACG | LnS2-FIP | 229 |
| XL-607 | ACTGTGTTGCTGATTATTCTGTCCAATTTAGTAGGAGACACTCCAT | LnS2-BIP | 230 |
| XL-608 | CCGCATCATTTTCCACTTTTAAGTG | LnS2-LB | 231 |
| XL-609 | CAACAGAATCTATTGTTAGATTTCC | LnS3-F3 | 232 |
| XL-610 | AGACATTAGTAAAGCAGAGATCA | LnS3-B3 | 233 |
| XL-611 | GTTCCAAGCATAAACAGATGCAAATCAAACTTGTGCCCTTTTGG | LnS3-FIP | 234 |
| XL-612 | ACTGTGTTGCTGATTATTCTGTCCAATTTAGTAGGAGACACTCCAT | LnS3-BIP | 235 |
| XL-613 | TGATCTCTGCTTTACTAATGTCT | LnS4-F3 | 236 |
| XL-614 | TGAGATTAGACTTCCTAAACAATC | LnS4-B3 | 237 |
| XL-615 | CAGTTTGCCCTGGAGCGATTATGCAGATTCATTTGTAATTAGAGG | LnS4-FIP | 238 |
| XL-616 | TACCAGATGATTTTACAGGCTGCCCACCAACCTTAGAATCAAGA | LnS4-BIP | 239 |
| XL-617 | ACTTTTAAGTGTTATGGAGTGTC | LnS5-F3 | 240 |
| XL-618 | CCAACCTTAGAATCAAGATTGT | LnS5-B3 | 241 |
| XL-619 | CGATTTGTCTGACTTCATCACCTCTTCCTACTAAATTAAATGATCTCTGC | LnS5-FIP | 242 |
| XL-620 | CTCCAGGGCAAACTGGAAAGTCCAAGCTATAACGCAGC | LnS5-BIP | 243 |
| XL-621 | TGTTATGGAGTGTCTCCTACT | LnS6-F3 | 244 |
| XL-622 | CCACCAACCTTAGAATCAAGA | LnS6-B3 | 245 |
| XL-623 | GAGCGATTTGTCTGACTTCATCATGCTTTACTAATGTCTATGCAGAT | LnS6-FIP | 246 |
| XL-624 | GGCAAACTGGAAAGATTGCTGATGTTAGAATTCCAAGCTATAACG | LnS6-BIP | 247 |
| XL-625 | GAGTTGATTTTTGTGGAAAGG | JpS1-F3 | 248 |
| XL-626 | GTTACAAACCAGTGTGTGC | JpS1-B3 | 249 |
| XL-627 | AGGGACATAAGTCACATGCAAGAAGCTATCATCTTATGTCCTTCCCTC | JpS1-FIP | 250 |
| XL-628 | ACAAGAAAAGAACTTCACAACTGCTTTGAAACAAAGACACCTTCA | JpS1-BIP | 251 |
| XL-629 | ACACCATGAGGTGCTGACT | JpS1-LF | 252 |
| XL-630 | TGCCATTTGTCATGATGGAAAAGC | JpS1-LB | 253 |
| XL-631 | GTGACTTATGTCCCTGCA | JpS2-F3 | 254 |
| XL-632 | ACAATTCCTATTACAACATCACAG | JpS2-B3 | 255 |
| XL-633 | ACGAGGAAAGTGTGCTTTTCCAGAAAAGAACTTCACAACTGC | JpS2-FIP | 256 |
| XL-634 | GTTTCAAATGGCACACACTGGTACACAAATGTGTTGTCTGTAG | JpS2-BIP | 257 |
| XL-635 | CCAATTTAATAGTGCTATTGGCA | JpS3-F3 | 258 |
| XL-636 | GCACTTCAGCCTCAACTT | JpS3-B3 | 259 |
| XL-637 | GCATTTTGGTTGACCACATCTTGAAAATTCAAGACTCACTTTCTTCC | JpS3-FIP | 260 |
| XL-638 | GCTTTAAACACGCTTGTTAAACAACTGTCAAGACGTGAAAGGAT | JpS3-BIP | 261 |
| XL-639 | GTTTTCCAAGTGCACTTGCTGT | JpS3-LF | 262 |
| XL-640 | ACAAGAAAAGAACTTCACAACT | JpS5-F3 | 263 |
| XL-641 | TGACAATTCCTATTACAACATCA | JpS5-B3 | 264 |
| XL-642 | GTGCCATTTGAAACAAAGACACCTTGCTCCTGCCATTTGTCAT | JpS5-FIP | 265 |
| XL-643 | ACACTGGTTTGTAACACAAAGGACAGTTACCAGACACAAATGTG | JpS5-BIP | 266 |
| XL-644 | CACGAGGAAAGTGTGCTTTTCCAT | JpS5-LF | 267 |
| XL-645 | GCTATTGGCAAAATTCAAGAC | JpS6-F3 | 268 |
| XL-646 | GCACTTCAGCCTCAACTT | JpS6-B3 | 269 |
| XL-647 | AGCTTGTGCATTTTGGTTGACCTCACTTTCTTCCACAGCA | JpS6-FIP | 270 |
| XL-648 | AACACGCTTGTTAAACAACTTAGCTTGTCAAGACGTGAAAGGAT | JpS6-BIP | 271 |
| XL-649 | CTTATGTCCTTCCCTCAGTC | JpS7-F3 | 272 |
| XL-650 | TGTAGTAATGATTTGTGGTTCAT | JpS7-B3 | 273 |
| XL-651 | GCAGGAGCAGTTGTGAAGTTCTGTAGTCTTCTTGCATGTGACTT | JpS7-FIP | 274 |
| XL-652 | TGTCATGATGGAAAAGCACACTCCTTTGTGTTACAAACCAGTG | JpS7-BIP | 275 |
| XL-653 | CGTGAAGGTGTCTTTGTTTCAAATG | JpS7-LB | 276 |
| XL-654 | ACACAGAATGTTCTCTATGAGA | JpS8-F3 | 277 |
| XL-655 | CGTGAAAGGATATCATTTAAAACAC | JpS8-B3 | 278 |
| XL-656 | ACTTGCTGTGGAAGAAAGTGAGTATTGCCAACCAATTTAATAGTGC | JpS8-FIP | 279 |
| XL-657 | TTGGAAAACTTCAAGATGTGGTCAGCACCAAAATTGGAGCTAAG | JpS8-BIP | 280 |
| XL-658 | TGCACAAGCTTTAAACACGCTTGTT | JpS8-LB | 281 |
| XL-659 | TCAAGACTCACTTTCTTCCA | JpS9-F3 | 282 |
| XL-660 | ATGTCTGCAAACTTTGAAGT | JpS9-B3 | 283 |
| XL-661 | GCGTGTTTAAAGCTTGTGCATTTCAGCAAGTGCACTTGGAA | JpS9-FIP | 284 |
| XL-662 | TGATATCCTTTCACGTCTTGACAAACTGCCTGTGATCAACCTA | JpS9-BIP | 285 |
| XL-663 | TTGAGGCTGAAGTGCAAATTGA | JpS9-LB | 286 |
| XL-664 | ACCTCATGGTGTAGTCTTCT | JpS10-F3 | 287 |
| XL-665 | CACAAATGTGTTGTCTGTAGT | JpS10-B3 | 288 |
| XL-666 | ATGACAAATGGCAGGAGCAGTGCATGTGACTTATGTCCCT | JpS10-FIP | 299 |
| XL-667 | AAGCACACTTTCCTCGTGAAGGTGTGGTTCATAAAAATTCCTTTG | JpS10-BIP | 300 |
| XL-668 | GTTTCAAATGGCACACACTGGTTTG | JpS10-LB | 301 |
| MKW0167 | TCGTGTTGTTTTAGATTTCATCT | N1-1F3 | 302 |
| MKW0168 | TTGAGTGAGAGCGGTGAA | N1-1B3 | 303 |
| MKW0169 | TCCACCAAACGTAATGCGGGCAAACTAAAATGTCTGATAATGGAC | N1-1FIP | 304 |
| MKW0170 | ACTGGCAGTAACCAGAATGGAGCAGTATTATTGGGTAAACCTTG | N1-1BIP | 305 |
| MKW0171 | GTGCATTTCGCTGATTTTGGG | N1-1LF | 306 |
| MKW0172 | ACGAACAAACTAAAATGTCTGA | N1-2F3 | 307 |
| MKW0173 | TTGAGTGAGAGCGGTGAA | N1-2B3 | 308 |
| MKW0174 | TGAATCTGAGGGTCCACCAAAATGGACCCCAAAATCAGC | N1-2FIP | 309 |
| MKW0175 | ACTGGCAGTAACCAGAATGGAGCAGTATTATTGGGTAAACCTTG | N1-2BIP | 310 |
| MKW0176 | CGTAATGCGGGGTGCATTTC | N1-2LF | 311 |
| MKW0177 | GATTTCATCTAAACGAACAAACT | N1-3F3 | 312 |
| MKW0178 | GGGAATTTAAGGTCTTCCTTG | N1-3B3 | 313 |
| MKW0179 | AGGGTCCACCAAACGTAATGCATGTCTGATAATGGACCCCA | N1-3FIP | 314 |
| MKW0180 | GGCGCGATCAAAACAACGTCCATGTTGAGTGAGAGCGG | N1-3BIP | 315 |
| MKW0181 | AAGGTTTACCCAATAATACTGCGTC | N1-3LB | 316 |
| MKW0182 | ACGAACAAACTAAAATGTCTGA | N1-4F3 | 317 |
| MKW0183 | CGAGGGAATTTAAGGTCTTCC | N1-4B3 | 318 |
| MKW0184 | TTACTGCCAGTTGAATCTGAGGGACCCCAAAATCAGCGAAAT | N1-4FIP | 319 |
| MKW0185 | CGATCAAAACAACGTCGGCCTTGCCATGTTGAGTGAGA | N1-4BIP | 320 |
| MKW0186 | AAACGTAATGCGGGGTGC | N1-4LF | 321 |
| MKW0187 | CAAGGTTTACCCAATAATACTGCGT | N1-4LB | 322 |
| MKW0188 | ACTAAAATGTCTGATAATGGACC | N1-5F3 | 323 |
| MKW0189 | CTCGAGGGAATTTAAGGTCT | N1-5B3 | 324 |
| MKW0190 | GTTACTGCCAGTTGAATCTGAGGCCAAAATCAGCGAAATGCA | N1-5FIP | 325 |
| MKW0191 | CGCGATCAAAACAACGTCGGCCATGTTGAGTGAGAGCG | N1-5BIP | 326 |
| MKW0192 | CACCAAACGTAATGCGGGG | N1-5LF | 327 |
| MKW0193 | CAAGGTTTACCCAATAATACTGCGT | N1-5LB | 328 |
| MKW0194 | ACGAACAAACTAAAATGTCTGA | N1-6F3 | 329 |
| MKW0195 | CCTCGAGGGAATTTAAGGT | N1-6B3 | 330 |
| MKW0196 | TTACTGCCAGTTGAATCTGAGGGATGGACCCCAAAATCAGC | N1-6FIP | 331 |
| MKW0197 | GGCCCCAAGGTTTACCCAATCTTCCTTGCCATGTTGAGT | N1-6BIP | 332 |
| MKW0198 | CGTAATGCGGGGTGCATTTC | N1-6LF | 333 |
| MKW0199 | AATACTGCGTCTTGGTTCACCG | N1-6LB | 334 |
| MKW0200 | CAAACTAAAATGTCTGATAATGGAC | N1-7F3 | 335 |
| MKW0201 | CTCGAGGGAATTTAAGGTCT | N1-7B3 | 336 |
| MKW0202 | GTTACTGCCAGTTGAATCTGAGGCCCAAAATCAGCGAAATGC | N1-7FIP | 337 |
| MKW0203 | GGCCCCAAGGTTTACCCAATTCCTTGCCATGTTGAGTG | N1-7BIP | 338 |
| MKW0204 | ACCAAACGTAATGCGGGGT | N1-7LF | 339 |
| MKW0205 | AATACTGCGTCTTGGTTCACC | N1-7LB | 340 |
| MKW0206 | AACACAAGCTTTCGGCAG | N2-1F3 | 341 |
| MKW0207 | TCTTTGTCATCCAATTTGATGG | N2-1B3 | 342 |
| MKW0208 | CGGCCAATGTTTGTAATCAGTTCCCAGAACAAACCCAAGGAAAT | N2-1FIP | 343 |
| MKW0209 | GTTCTTCGGAATGTCGCGCACCTGTGTAGGTCAACCAC | N2-1BIP | 344 |
| MKW0210 | TGATTAGTTCCTGGTCCCCAAA | N2-1LF | 345 |
| MKW0211 | TTGGCATGGAAGTCACACCT | N2-1LB | 346 |
| MKW0212 | AACACAAGCTTTCGGCAG | N2-2F3 | 347 |
| MKW0213 | TTGGATCTTTGTCATCCAATT | N2-2B3 | 348 |
| MKW0214 | CGGCCAATGTTTGTAATCAGTTCCCAGAACAAACCCAAGGAAAT | N2-2FIP | 349 |
| MKW0215 | GTTCTTCGGAATGTCGCGCATGATGGCACCTGTGTAGG | N2-2BIP | 350 |
| MKW0216 | TGATTAGTTCCTGGTCCCCAAA | N2-2LF | 351 |
| MKW0217 | TTGGCATGGAAGTCACACCT | N2-2LB | 352 |
| MKW0218 | TCCAGAACAAACCCAAGG | N2-3F3 | 353 |
| MKW0219 | ATGACTTGATCTTTGAAATTTGG | N2-3B3 | 354 |
| MKW0220 | GCAATTTGCGGCCAATGTTTGAAATTTTGGGGACCAGGA | N2-3FIP | 355 |
| MKW0221 | TGGCATGGAAGTCACACCTTTCCAATTTGATGGCACCTG | N2-3BIP | 356 |
| MKW0222 | CGGGAACGTGGTTGACCT | N2-3LB | 357 |
| MKW0223 | AACACAAGCTTTCGGCAG | N2-4F3 | 358 |
| MKW0224 | GACTTGATCTTTGAAATTTGGATCT | N2-4B3 | 359 |
| MKW0225 | TGCGGCCAATGTTTGTAATCAGCCAAGGAAATTTTGGGGAC | N2-4FIP | 360 |
| MKW0226 | TGGCATGGAAGTCACACCTTATCCAATTTGATGGCACCT | N2-4BIP | 361 |
| MKW0227 | CGGGAACGTGGTTGACCT | N2-4LB | 362 |
| MKW0228 | AACACAAGCTTTCGGCAG | N2-5F3 | 363 |
| MKW0229 | TCTTTGTCATCCAATTTGATGG | N2-5B3 | 364 |
| MKW0230 | TGCGGCCAATGTTTGTAATCAGCAGAACAAACCCAAGGAAAT | N2-5FIP | 365 |
| MKW0231 | GTTCTTCGGAATGTCGCGCACACCTGTGTAGGTCAACC | N2-5BIP | 366 |
| MKW0232 | TGATTAGTTCCTGGTCCCCAAA | N2-5LF | 367 |
| MKW0233 | TTGGCATGGAAGTCACACCT | N2-5LB | 368 |
| MKW0234 | AACACAAGCTTTCGGCAG | N2-6F3 | 369 |
| MKW0235 | GATCTTTGTCATCCAATTTGATG | N2-6B3 | 370 |
| MKW0236 | CGGCCAATGTTTGTAATCAGTTCCAGAACAAACCCAAGGAAAT | N2-6FIP | 371 |
| MKW0237 | GTTCTTCGGAATGTCGCGCACCTGTGTAGGTCAACCAC | N2-6BIP | 372 |
| MKW0238 | TGATTAGTTCCTGGTCCCCAAA | N2-6LF | 373 |
| MKW0239 | TTGGCATGGAAGTCACACCT | N2-6LB | 374 |
| MKW0240 | TAACACAAGCTTTCGGCA | N2-7F3 | 375 |
| MKW0241 | GAAATTTGGATCTTTGTCATCC | N2-7B3 | 376 |
| MKW0242 | GCAATTTGCGGCCAATGTTTGCCAAGGAAATTTTGGGGAC | N2-7FIP | 377 |
| MKW0243 | GTTCTTCGGAATGTCGCGCATTTGATGGCACCTGTGTAG | N2-7BIP | 378 |
| MKW0244 | CAGTTCCTTGTCTGATTAGTTCCTG | N2-7LF | 379 |
| MKW0245 | TTGGCATGGAAGTCACACCT | N2-7LB | 380 |
| MKW0246 | AACACAAGCTTTCGGCAG | N2-8F3 | 381 |
| MKW0247 | CTTTGAAATTTGGATCTTTGTCA | N2-8B3 | 382 |
| MKW0248 | TGCGGCCAATGTTTGTAATCAGCCAAGGAAATTTTGGGGAC | N2-8FIP | 383 |
| MKW0249 | TGGCATGGAAGTCACACCTTTCCAATTTGATGGCACCTG | N2-8BIP | 384 |
| MKW0250 | CGGGAACGTGGTTGACCT | N2-8LB | 385 |
| MKW0251 | AACACAAGCTTTCGGCAG | N2-9F3 | 386 |
| MKW0252 | AGCAAAATGACTTGATCTTTGA | N2-9B3 | 387 |
| MKW0253 | GCAATTTGCGGCCAATGTTTAAGGAAATTTTGGGGACCAG | N2-9FIP | 388 |
| MKW0254 | ATGGAAGTCACACCTTCGGGTCTTTGTCATCCAATTTGATGG | N2-9BIP | 389 |
| MKW0255 | AACGTGGTTGACCTACACAGG | N2-9LB | 390 |
| MKW0256 | GAAATCTGCTGCTGAGGC | N2-10F3 | 391 |
| MKW0257 | AAGGTGTGACTTCCATGC | N2-10B3 | 392 |
| MKW0258 | GGTTTGTTCTGGACCACGTCTAAACGTACTGCCACTAAAGC | N2-10FIP | 393 |
| MKW0259 | ACTGATTACAAACATTGGCCGCGACATTCCGAAGAACGCT | N2-10BIP | 394 |
| MKW0260 | GCCGAAAGCTTGTGTTACATTGTAT | N2-10LF | 395 |
| MKW0261 | TCTTCTCGTTCCTCATCAC | CN-1F3 | 396 |
| MKW0262 | CTTAGAAGCCTCAGCAGC | CN-1B3 | 397 |
| MKW0263 | TCTAGCAGGAGAAGTTCCCCTAGTAGTCGCAACAGTTCAAGAA | CN-1FIP | 398 |
| MKW0264 | CTGCTTGACAGATTGAACCAGCGTGACAGTTTGGCCTTGTT | CN-1BIP | 399 |
| MKW0265 | AAAATGTCTGGTAAAGGCCAACAAC | CN-1LB | 400 |
| MKW0266 | AGTAGGGGAACTTCTCCTG | CN-2F3 | 401 |
| MKW0267 | CTGCCGAAAGCTTGTGTT | CN-2B3 | 402 |
| MKW0268 | GCTGGTTCAATCTGTCAAGCAGTAGAATGGCTGGCAATGG | CN-2FIP | 403 |
| MKW0269 | GCCAACAACAACAAGGCCAAAGTACGTTTTTGCCGAGG | CN-2BIP | 404 |
| MKW0270 | GCAAGAGCAGCATCACCG | CN-2LF | 405 |
| MKW0271 | AGTAGGGGAACTTCTCCTG | CN-3F3 | 406 |
| MKW0272 | CTGCCGAAAGCTTGTGTT | CN-3B3 | 407 |
| MKW0273 | GCTGGTTCAATCTGTCAAGCAGTAGAATGGCTGGCAATGG | CN-3FIP | 408 |
| MKW0274 | AACAAGGCCAAACTGTCACTAACAGTACGTTTTTGCCGAG | CN-3BIP | 409 |
| MKW0275 | GCAAGAGCAGCATCACCG | CN-3LF | 410 |
| MKW0276 | TCCTCATCACGTAGTCGC | CN-4F3 | 411 |
| MKW0277 | GGCTTCTTAGAAGCCTCAG | CN-4B3 | 412 |
| MKW0278 | CCAGCCATTCTAGCAGGAGAAAACAGTTCAAGAAATTCAACTCC | CN-4FIP | 413 |
| MKW0279 | TTGACAGATTGAACCAGCTTGAGACAGCAGATTTCTTAGTGACAGT | CN-4BIP | 414 |
| MKW0280 | GTTCCCCTACTGCTGCCT | CN-4LF | 415 |
| MKW0281 | GCAAAATGTCTGGTAAAGGCCAACA | CN-4LB | 416 |
| MKW0282 | GCTTCTACGCAGAAGGGA | CN-5F3 | 417 |
| MKW0283 | GTGACAGTTTGGCCTTGT | CN-5B3 | 418 |
| MKW0284 | CTACTGCTGCCTGGAGTTGAATTCCTCTTCTCGTTCCTCATC | CN-5FIP | 419 |
| MKW0285 | GCTTTGCTGCTGCTTGACAGTGTTGTTGGCCTTTACCA | CN-5BIP | 420 |
| MKW0286 | CTTGAACTGTTGCGACTACGT | CN-5LF | 421 |
| MKW0287 | ATTGAACCAGCTTGAGAGCAAA | CN-5LB | 422 |
| MKW0288 | GCTGCAATCGTGCTACAACT | CN-8F3 | 423 |
| MKW0289 | TTTGCTCTCAAGCTGGTTCA | CN-8B3 | 424 |
| MKW0290 | TGCGACTACGTGATGAGGAACGTTGCCAAAAGGCTTCTACGC | CN-8FIP | 425 |
| MKW0291 | TCTCCTGCTAGAATGGCTGGCATCTGTCAAGCAGCAGCAAAG | CN-8BIP | 426 |
| MKW0292 | TTGACTGCCGCCTCTGC | CN-8LF | 427 |
| | gaaatTAATACGACTCACTATAGGGTGATTAGTTCCTGGTCCCCAAA | N2-2LFT7 | 528 |
| | gaaatTAATACGACTCACTATAGGGACACCATGAGGTGCTGACT | Jps 1LFT7 | 529 |

[0209] The primer sets were tested and each set was ranked as either 4: No amplification/Extremely poor amplification; 3: Poor sensitivity and slow amplification OR 2/2 NTC positive; 2: Good sensitivity and slow amplification or poor sensitivity and fast amplification; or 1: Good sensitivity and speed. Good speed: ave 3000<18: ave 30<25; Good sensitivity: 2/2 for 30 cp. The results of LAMP primer screening are demonstrated in Tables 21 and 22.

TABLE 21
LAMP Primers

| Amplicon | | | | | | | Primer Set |
|---|---|---|---|---|---|---|---|
| ID | F3 | B3 | FIP | BIP | LF | LB | ID |
| B1 | XL-500 | XL-501 | XL-502 | XL-503 | | XL-504 | B1 |
| B2 | XL-505 | XL-506 | XL-507 | XL-508 | | XL-509 | B2 |
| B3 | XL-510 | XL-511 | XL-512 | XL-513 | XL-514 | XL-515 | B3 |
| B4 | XL-516 | XL-517 | XL-518 | XL-519 | | XL-520 | B4 |
| B5 | XL-521 | XL-522 | XL-523 | XL-524 | XL-525 | XL-526 | B5 |
| B6 | XL-527 | XL-528 | XL-529 | XL-530 | | XL-531 | B6 |
| B7 | XL-532 | XL-533 | XL-534 | XL-535 | | XL-536 | B7 |
| B8 | XL-537 | XL-538 | XL-539 | XL-540 | | XL-541 | B8 |
| HK1 | XL-542 | XL-543 | XL-544 | XL-545 | | | HK1 |
| HK2 | XL-546 | XL-547 | XL-548 | XL-549 | | XL-550 | HK2 |
| HK3 | XL-551 | XL-552 | XL-553 | XL-554 | | XL-555 | HK3 |
| HK4 | XL-556 | XL-557 | XL-558 | XL-559 | | XL-560 | HK4 |
| HK5 | XL-561 | XL-562 | XL-563 | XL-564 | XL-565 | XL-566 | HK5 |
| HK6 | XL-567 | XL-568 | XL-569 | XL-570 | | XL-571 | HK6 |
| HK7 | XL-572 | XL-573 | XL-574 | XL-575 | XL-576 | XL-577 | HK7 |
| HK8 | XL-578 | XL-579 | XL-580 | XL-581 | | XL-582 | HK8 |
| JP1 | MKW0112 | MKW0113 | MKW0114 | MKW0115 | MKW0116 | | JP1 |
| JP2 | MKW0117 | MKW0118 | MKW0119 | MKW0120 | | MKW0121 | JP2 |
| JP5 | MKW0122 | MKW0123 | MKW0124 | MKW0125 | MKW0126 | MKW0127 | JP5 |
| JP6 | MKW0128 | MKW0129 | MKW0130 | MKW0131 | | MKW0132 | JP6 |
| JP9 | MKW0133 | MKW0134 | MKW0135 | MKW0136 | MKW0137 | | JP9 |
| JP10 | MKW0138 | MKW0139 | MKW0140 | MKW0141 | MKW0142 | | JP10 |
| JP11 | MKW0143 | MKW0144 | MKW0145 | MKW0146 | MKW0147 | | JP11 |
| JP12 | MKW0148 | MKW0149 | MKW0150 | MKW0151 | MKW0152 | MKW0153 | JP12 |
| JP13 | MKW0154 | MKW0155 | MKW0156 | MKW0157 | MKW0158 | MKW0159 | JP13 |
| LnS1 | XL-600 | XL-601 | XL-602 | XL-603 | | | LnS1 |
| LnS2 | XL-604 | XL-605 | XL-606 | XL-607 | | XL-608 | LnS2 |
| LnS3 | XL-609 | XL-610 | XL-611 | XL-612 | | | LnS3 |
| LnS4 | XL-613 | XL-614 | XL-615 | XL-616 | | | LnS4 |
| LnS5 | XL-617 | XL-618 | XL-619 | XL-620 | | | LnS5 |
| LnS6 | XL-621 | XL-622 | XL-623 | XL-624 | | | LnS6 |
| JpS1 | XL-625 | XL-626 | XL-627 | XL-628 | XL-629 | XL-630 | JpS1 |
| JpS2 | XL-631 | XL-632 | XL-633 | XL-634 | | | JpS2 |
| JpS3 | XL-635 | XL-636 | XL-637 | XL-638 | XL-639 | | JpS3 |
| JpS5 | XL-640 | XL-641 | XL-642 | XL-643 | XL-644 | | JpS5 |
| JpS6 | XL-645 | XL-646 | XL-647 | XL-648 | | | JpS6 |
| JpS7 | XL-649 | XL-650 | XL-651 | XL-652 | | XL-653 | JpS7 |
| JpS8 | XL-654 | XL-655 | XL-656 | XL-657 | | XL-658 | JpS8 |
| JpS9 | XL-659 | XL-660 | XL-661 | XL-662 | | XL-663 | JpS9 |
| JpS10 | XL-664 | XL-665 | XL-666 | XL-667 | | XL-668 | JpS10 |
| N1-1 | MKW0167 | MKW0168 | MKW0169 | MKW0170 | MKW0171 | | N1-1 |
| N1-2 | MKW0172 | MKW0173 | MKW0174 | MKW0175 | MKW0176 | | N1-2 |
| N1-3 | MKW0177 | MKW0178 | MKW0179 | MKW0180 | | MKW0181 | N1-3 |
| N1-4 | MKW0182 | MKW0183 | MKW0184 | MKW0185 | MKW0186 | MKW0187 | N1-4 |
| N1-5 | MKW0188 | MKW0189 | MKW0190 | MKW0191 | MKW0192 | MKW0193 | N1-5 |
| N1-6 | MKW0194 | MKW0195 | MKW0196 | MKW0197 | MKW0198 | MKW0199 | N1-6 |
| N1-7 | MKW0200 | MKW0201 | MKW0202 | MKW0203 | MKW0204 | MKW0205 | N1-7 |
| N2-1 | MKW0206 | MKW0207 | MKW0208 | MKW0209 | MKW0210 | MKW0211 | N2-1 |
| N2-2 | MKW0212 | MKW0213 | MKW0214 | MKW0215 | MKW0216 | MKW0217 | N2-2 |
| N2-3 | MKW0218 | MKW0219 | MKW0220 | MKW0221 | | MKW0222 | N2-3 |
| N2-4 | MKW0223 | MKW0224 | MKW0225 | MKW0226 | | MKW0227 | N2-4 |
| N2-5 | MKW0228 | MKW0229 | MKW0230 | MKW0231 | MKW0232 | MKW0233 | N2-5 |
| N2-6 | MKW0234 | MKW0235 | MKW0236 | MKW0237 | MKW0238 | MKW0239 | N2-6 |
| N2-7 | MKW0240 | MKW0241 | MKW0242 | MKW0243 | MKW0244 | MKW0245 | N2-7 |
| N2-8 | MKW0246 | MKW0247 | MKW0248 | MKW0249 | | MKW0250 | N2-8 |
| N2-9 | MKW0251 | MKW0252 | MKW0253 | MKW0254 | | MKW0255 | N2-9 |
| N2-10 | MKW0256 | MKW0257 | MKW0258 | MKW0259 | MKW0260 | | N2-10 |
| CN-1 | MKW0261 | MKW0262 | MKW0263 | MKW0264 | | MKW0265 | CN-1 |
| CN-2 | MKW0266 | MKW0267 | MKW0268 | MKW0269 | MKW0270 | | CN-2 |
| CN-3 | MKW0271 | MKW0272 | MKW0273 | MKW0274 | MKW0275 | | CN-3 |
| CN-4 | MKW0276 | MKW0277 | MKW0278 | MKW0279 | MKW0280 | MKW0281 | CN-4 |
| CN-5 | MKW0282 | MKW0283 | MKW0284 | MKW0285 | MKW0286 | MKW0287 | CN-5 |
| CN-8 | MKW0288 | MKW0289 | MKW0290 | MKW0291 | MKW0292 | | CN-8 |

TABLE 22
Ct values

| Primer Set | | | | | | | | | |
|---|---|---|---|---|---|---|---|---|---|
| ID | ~3000 cp | | ~30 cp | | NTC | | Ave 3000 cp | Ave 30 cp | Ranking |
| B1 | 21.5 | n/d | n/d | 21.6 | 12.0 | 30.2 | 21.5 | 21.6 | 4 |
| B2 | 17.3 | 17.3 | 23.9 | 29.2 | n/d | n/d | 17.3 | 26.6 | 2 |
| B3 | 12.2 | 11.7 | 30.8 | n/d | n/d | n/d | 12.0 | 30.8 | 2 |
| B4 | 19.3 | 20.6 | 33.0 | 22.9 | n/d | n/d | 19.9 | 28.0 | 3 |
| B5 | 18.0 | 16.4 | 29.4 | n/d | n/d | n/d | 17.2 | 29.4 | 2 |
| B6 | 24.9 | 26.2 | n/d | n/d | n/d | n/d | 25.6 | #DIV/0! | 3 |
| B7 | 21.4 | 23.2 | n/d | 37.2 | n/d | n/d | 22.3 | 37.2 | 3 |
| B8 | 18.9 | 19.1 | n/d | n/d | 34.1 | 35.5 | 19.0 | #DIV/0! | 3 |
| HK1 | 37.4 | n/d | n/d | n/d | n/d | n/d | 37.4 | #DIV/0! | 4 |
| HK2 | 26.1 | 34.2 | n/d | n/d | n/d | n/d | 30.1 | #DIV/0! | 3 |
| HK3 | 17.1 | 17.1 | 24.2 | 25.8 | n/d | n/d | 17.1 | 25.0 | 1 |
| HK4 | 19.2 | 18.8 | n/d | n/d | n/d | n/d | 19.0 | #DIV/0! | 2 |
| HK5 | 11.9 | 12.0 | 16.8 | 17.0 | n/d | n/d | 11.9 | 16.9 | 1 |
| HK6 | 20.1 | 19.5 | n/d | n/d | n/d | n/d | 19.8 | #DIV/0! | 2 |
| HK7 | 10.8 | 11.0 | n/d | n/d | n/d | n/d | 10.9 | #DIV/0! | 2 |
| HK8 | 24.4 | 21.5 | 34.6 | n/d | n/d | n/d | 22.9 | 34.6 | 3 |
| JP1 | 20.9 | 21.7 | 30.6 | 26.8 | n/d | n/d | 21.3 | 28.7 | 2 |
| JP2 | 18.4 | 18.4 | 29.1 | 29.3 | n/d | n/d | 18.4 | 29.2 | 2 |
| JP5 | 9.7 | 9.4 | 13.7 | 12.6 | 47.6 | n/d | 9.6 | 13.1 | 1 |
| JP6 | 17.8 | 19.4 | 27.6 | 30.1 | n/d | 39.9 | 18.6 | 28.8 | 2 |
| JP9 | 37.2 | 39.2 | 51.7 | n/d | n/d | n/d | 38.2 | 51.7 | 3 |
| JP10 | 48.8 | 45.9 | n/d | n/d | n/d | n/d | 47.4 | #DIV/0! | 3 |
| JP11 | 31.4 | 30.3 | n/d | 49.9 | n/d | n/d | 30.8 | 49.9 | 3 |
| JP12 | 16.1 | 16.8 | n/d | 21.9 | n/d | n/d | 16.5 | 21.9 | 2 |
| JP13 | 13.6 | 14.4 | 22.9 | 18.6 | n/d | n/d | 14.0 | 20.7 | 2 |
| LnS1 | n/d | n/d | 53.3 | 38.7 | n/d | n/d | #DIV/0! | 46.0 | 4 |
| LnS2 | 27.7 | 26.9 | 33.2 | 44.7 | n/d | n/d | 27.3 | 39.0 | 3 |
| LnS3 | 38.6 | 35.6 | n/d | n/d | n/d | n/d | 37.1 | #DIV/0! | 3 |
| LnS4 | 26.4 | 26.6 | 36.5 | 34.0 | n/d | n/d | 26.5 | 35.2 | 3 |
| LnS5 | n/d | n/d | n/d | n/d | n/d | n/d | #DIV/0! | #DIV/0! | 4 |
| LnS6 | n/d | n/d | n/d | n/d | n/d | 51.1 | #DIV/0! | #DIV/0! | 4 |
| JpS1 | 11.8 | 12.0 | 15.8 | 24.0 | n/d | n/d | 11.9 | 19.9 | 1 |
| JpS2 | 29.2 | 28.5 | 57.8 | 56.3 | n/d | n/d | 28.9 | 57.0 | 3 |
| JpS3 | 21.9 | 22.3 | n/d | 26.3 | n/d | n/d | 22.1 | 26.3 | 3 |
| JpS5 | 17.9 | 18.0 | 26.0 | 21.7 | n/d | n/d | 17.9 | 23.9 | 1 |
| JpS6 | 33.3 | 33.2 | 38.0 | 52.7 | 44.9 | 45.3 | 33.2 | 45.4 | 3 |
| JpS7 | 30.4 | 30.4 | 39.8 | 38.7 | n/d | n/d | 30.4 | 39.3 | 3 |
| JpS8 | 15.7 | 16.5 | 20.9 | 19.3 | n/d | n/d | 16.1 | 20.1 | 1 |
| JpS9 | 20.1 | 19.3 | 26.5 | 26.8 | n/d | n/d | 19.7 | 26.7 | 2 |
| JpS10 | 19.9 | 19.8 | n/d | 27.4 | n/d | n/d | 19.9 | 27.4 | 2 |
| N1-1 | 21.946 | 25.496 | n/d | n/d | n/d | n/d | 23.7 | #DIV/0! | 3 |
| N1-2 | 27.221 | 24.863 | 34.189 | n/d | 31.641 | n/d | 26.0 | 34.2 | 3 |
| N1-3 | 24.853 | 25.655 | n/d | 27.966 | n/d | n/d | 25.3 | 28.0 | 3 |
| N1-4 | 15.157 | 14.626 | 34.418 | n/d | n/d | n/d | 14.9 | 34.4 | 2 |
| N1-5 | 12.444 | 11.89 | n/d | 24.671 | n/d | n/d | 12.2 | 24.7 | 2 |
| N1-6 | 11.749 | 11.83 | 18.703 | 19.939 | n/d | n/d | 11.8 | 19.3 | 1 |
| N1-7 | 12.871 | 13.762 | 21.513 | 29.409 | n/d | n/d | 13.3 | 25.5 | 2 |
| N2-1 | 16.2 | 15.2 | 23.9 | 20.0 | n/d | n/d | 15.7 | 21.9 | 1 |
| N2-2 | 16.5 | 16.6 | 23.0 | 22.5 | n/d | n/d | 16.5 | 22.7 | 1 |
| N2-3 | 19.1 | 18.3 | 25.5 | 23.3 | n/d | n/d | 18.7 | 24.4 | 2 |
| N2-4 | 16.8 | 17.7 | 24.5 | 25.2 | n/d | 29.4 | 17.2 | 24.8 | 1 |
| N2-5 | 15.4 | 14.5 | 20.9 | 18.9 | 34.5 | n/d | 15.0 | 19.9 | 1 |
| N2-6 | 15.9 | 16.1 | 22.8 | 21.2 | n/d | n/d | 16.0 | 22.0 | 1 |
| N2-7 | 11.1 | 10.5 | 16.2 | 14.3 | n/d | n/d | 10.8 | 15.3 | 1 |
| N2-8 | 15.3 | 15.1 | 19.1 | 17.9 | n/d | n/d | 15.2 | 18.5 | 1 |
| N2-9 | 20.1 | 21.9 | 37.7 | 27.9 | n/d | n/d | 21.0 | 32.8 | 2 |
| N2-10 | 27.5 | 26.6 | 38.4 | 32.2 | n/d | 38.3 | 27.1 | 35.3 | 2 |
| CN-1 | 15.9 | 16.4 | 21.8 | 19.1 | 30.1 | 25.0 | 16.1 | 20.4 | 3 |
| CN-2 | n/d | 39.8 | n/d | n/d | n/d | n/d | 39.8 | #DIV/0! | 4 |
| CN-3 | n/d | n/d | n/d | 34.1 | n/d | n/d | #DIV/0! | 34.1 | 4 |
| CN-4 | 12.9 | 13.3 | 18.4 | 17.7 | n/d | n/d | 13.1 | 18.1 | 1 |
| CN-5 | 12.5 | 13.4 | 16.2 | 15.7 | n/d | n/d | 13.0 | 16.0 | 1 |
| CN-8 | 18.5 | 17.8 | 26.2 | 26.7 | n/d | n/d | 18.1 | 26.5 | 2 |

[0210] Notably some algorithm designed primers completely failed to amplify target. Thus, these large scale testing assays were required to empirically identify a LAMP primer set useful for amplifying SARS-CoV-2 nucleic acids.

[0211] Having identified viable primer sets a guide RNA comprising a crRNA needed to be constructed that binds to the nucleic acid amplified by the LAMP primer set. Between 2 and 5 guides were designed for a given viable LAMP primer set. To design guides, 28 nt regions located between F2 and F1c, F1c and B1c, or B1c and B2 binding regions were selected for guide screening. Guides were designed by available algorithms to have <10 bp overlap with any LAMP primer in the set. After initial primer screening, the potential guides were tested with the Sherlock reaction. The chosen guides showed high signal to noise ratio comparing the signal observed from LAMP amplification from target versus LAMP amplification without target. Designed guides are listed in Table 23

TABLE 23

| | | Designed, | SEQ |
|---|---|---|---|
| | | Not | ID |
| Name | Sequences | Tested | NO |
| XLcr-600 | gatttagactaccccaaaaacgaaggggactaaaacTCTGGTAATTTATAATTATAATCAGCAA | X | 428 |
| XLcr-601 | gatttagactaccccaaaaacgaaggggactaaaacAAAATCATCTGGTAATTTATAATTATAA | X | 429 |
| XLcr-602 | gatttagactaccccaaaaacgaaggggactaaaacCTGGTAATTTATAATTATAATCAGCAAT | X | 430 |
| XLcr-603 | gatttagactaccccaaaaacgaaggggactaaaacACACTTAAAAGTGGAAAATGATGCGGAA | X | 431 |
| XLcr-604 | gatttagactaccccaaaaacgaaggggactaaaacAAAAGTGGAAAATGATGCGGAATTATAT | X | 432 |
| XLcr-605 | gatttagactaccccaaaaacgaaggggactaaaacACACTTAAAAGTGGAAAATGATGCGGAA | X | 433 |
| XLcr-606 | gatttagactaccccaaaaacgaaggggactaaaacTAAAAGTGGAAAATGATGCGGAATTATA | X | 434 |
| XLcr-607 | gatttagactaccccaaaaacgaaggggactaaaacGAAAGATTGCTGATTATAATTATAAATT | X | 435 |
| XLcr-608 | gatttagactaccccaaaaacgaaggggactaaaacTGCGTTATAGCTTGGAATTCTAACAATC | X | 436 |
| XLcr-609 | gatttagactaccccaaaaacgaaggggactaaaacATTACAAATGAATCTGCATAGACATTAG | X | 437 |
| XLcr-610 | gatttagactaccccaaaaacgaaggggactaaaacTCTGGTAATTTATAATTATAATCAGCAA | X | 438 |
| XLcr-611 | gatttagactaccccaaaaacgaaggggactaaaacCCTGTAAAATCATCTGGTAATTTATAAT | X | 439 |
| XLcr-612 | gatttagactaccccaaaaacgaaggggactaaaacGCCTGTAAAATCATCTGGTAATTTATAA | X | 440 |
| XLcr-613 | gatttagactaccccaaaaacgaaggggactaaaacAAAGTGTGCTTTTCCATCATGACAAATG | X | 441 |
| XLcr-614 | gatttagactaccccaaaaacgaaggggactaaaacGTGTGCTTTTCCATCATGACAAATGGCA | X | 442 |
| XLcr-615 | gatttagactaccccaaaaacgaaggggactaaaacTGGTTCATAAAAATTCCTTTGTGTTACA | X | 443 |
| XLcr-616 | gatttagactaccccaaaaacgaaggggactaaaacATTTGTGGTTCATAAAAATTCCTTTGTG | X | 444 |
| XLcr-617 | gatttagactaccccaaaaacgaaggggactaaaacCATTTAAAACACTTGAAATTGCACCAAA | X | 445 |
| XLcr-618 | gatttagactaccccaaaaacgaaggggactaaaacAAACACTTGAAATTGCACCAAAATTGGA | X | 446 |
| XLcr-619 | gatttagactaccccaaaaacgaaggggactaaaacTCTGTAGTAATGATTTGTGGTTCATAAA | X | 447 |
| XLcr-620 | gatttagactaccccaaaaacgaaggggactaaaacTGATGGAAAAGCACACTTTCCTCGTGAA | X | 448 |
| XLcr-621 | gatttagactaccccaaaaacgaaggggactaaaacAAGTGCACTTGGAAAACTTCAAGATGTG | X | 449 |
| XLcr-622 | gatttagactaccccaaaaacgaaggggactaaaacCATTTAAAACACTTGAAATTGCACCAAA | X | 450 |
| XLcr-623 | gatttagactaccccaaaaacgaaggggactaaaacCCATTTGAAACAAAGACACCTTCACGAG | X | 451 |
| XLcr-624 | gatttagactaccccaaaaacgaaggggactaaaacGTGCCATTTGAAACAAAGACACCTTCAC | X | 452 |
| XLcr-625 | gatttagactaccccaaaaacgaaggggactaaaacACAAGCGTGTTTAAAGCTTGTGCATTTT | X | 453 |
| XLcr-626 | gatttagactaccccaaaaacgaaggggactaaaacGCACCAAAATTGGAGCTAAGTTGTTTAA | X | 454 |
| XLcr-627 | gatttagactaccccaaaaacgaaggggactaaaacTGAAATTGCACCAAAATTGGAGCTAAGT | X | 455 |
| XLcr-628 | gatttagactaccccaaaaacgaaggggactaaaacCCAGTGTGTGCCATTTGAAACAAAGACA | X | 456 |
| XLcr-629 | gatttagactaccccaaaaacgaaggggactaaaacACAAACCAGTGTGTGCCATTTGAAACAA | X | 457 |
| MKW0293 | gatttagactaccccaaaaacgaaggggactaaaacCCGACGTTGTTTTGATCGCGCCCCACTG | X | 458 |
| MKW0294 | gatttagactaccccaaaaacgaaggggactaaaacGTGGGGCGCGATCAAAACAACGTCGGCC | X | 459 |
| MKW0295 | gatttagactaccccaaaaacgaaggggactaaaacGAACGCAGTGGGGCGCGATCAAAACAAC | X | 460 |
| MKW0296 | gatttagactaccccaaaaacgaaggggactaaaacGGCAGTAACCAGAATGGAGAACGCAGTG | X | 461 |
| MKW0297 | gatttagactaccccaaaaacgaaggggactaaaacCGCCCCACTGCGTTCTCCATTCTGGTTA | — | 462 |
| MKW0298 | gatttagactaccccaaaaacgaaggggactaaaacGCTGAAGCGCTGGGGGCAAATTGTGCAA | — | 463 |
| MKW0299 | gatttagactaccccaaaaacgaaggggactaaaacGAAGCGCTGGGGGCAAATTGTGCAATTT | — | 464 |
| MKW0300 | gatttagactaccccaaaaacgaaggggactaaaacCAATTTGCCCCCAGCGCTTCAGCGTTCT | — | 465 |
| MKW0301 | gatttagactaccccaaaaacgaaggggactaaaacCCCCCAGCGCTTCAGCGTTCTTCGGAAT | — | 466 |
| MKW0302 | gatttagactaccccaaaaacgaaggggactaaaacAAATTGCACAATTTGCCCCCAGCGCTTC | — | 467 |
| MKW0303 | gatttagactaccccaaaaacgaaggggactaaaacAATGGCGGTGATGCTGCTCTTGCTTTGC | — | 468 |
| MKW0304 | gatttagactaccccaaaaacgaaggggactaaaacGCAAAGCAAGAGCAGCATCACCGCCATT | — | 469 |
| MKW0305 | gatttagactaccccaaaaacgaaggggactaaaacTGAGAGCAAAATGTCTGGTAAAGGCCAA | X | 470 |
| MKW0306 | gatttagactaccccaaaaacgaaggggactaaaacGGTGATGCTGCTCTTGCTTTGCTGCTGC | — | 471 |
| MKW0307 | gatttagactaccccaaaaacgaaggggactaaaacGCAGCAGCAAAGCAAGAGCAGCATCACC | — | 472 |
| XLcr-500 | gatttagactaccccaaaaacgaaggggactaaaacTGACAAATGTTAAAAACACTATTAGCAT | X | 473 |
| XLcr-501 | gatttagactaccccaaaaacgaaggggactaaaacAATGTTAAAAACACTATTAGCATAAGCA | X | 474 |
| XLcr-502 | gatttagactaccccaaaaacgaaggggactaaaacCAAATGTTAAAAACACTATTAGCATAAG | X | 475 |
| XLcr-503 | gatttagactaccccaaaaacgaaggggactaaaacTGACAGCTTGACAAATGTTAAAAACACT | X | 476 |
| XLcr-504 | gatttagactaccccaaaaacgaaggggactaaaacCGTGACAGCTTGACAAATGTTAAAAACA | X | 477 |
| XLcr-505 | gatttagactaccccaaaaacgaaggggactaaaacTGTTGTAGCTTGTCACACCGTTTCTATA | — | 478 |
| XLcr-506 | gatttagactaccccaaaaacgaaggggactaaaacCATCTCCTGATGAGGTTCCACCTGGTTT | — | 479 |
| XLcr-507 | gatttagactaccccaaaaacgaaggggactaaaacCTCCTGATGAGGTTCCACCTGGTTTAAC | — | 480 |
| XLcr-508 | gatttagactaccccaaaaacgaaggggactaaaacTAGCATAAGCAGTTGTGGCATCTCCTGA | X | 481 |
| XLcr-509 | gatttagactaccccaaaaacgaaggggactaaaacTAGAAACGGTGTGACAAGCTACAACACG | — | 482 |
| XLcr-510 | gatttagactaccccaaaaacgaaggggactaaaacACGGTGTGACAAGCTACAACACGTTGTA | — | 483 |
| XLcr-511 | gatttagactaccccaaaaacgaaggggactaaaacCATCTCCTGATGAGGTTCCACCTGGTTT | — | 484 |
| XLcr-512 | gatttagactaccccaaaaacgaaggggactaaaacCCTGATGAGGTTCCACCTGGTTTAACAT | — | 485 |
| XLcr-513 | gatttagactaccccaaaaacgaaggggactaaaacCCTGATGAGGTTCCACCTGGTTTAACAT | X | 486 |
| XLcr-514 | gatttagactaccccaaaaacgaaggggactaaaacTGAGGTTCCACCTGGTTTAACATATAGT | X | 487 |
| XLcr-515 | gatttagactaccccaaaaacgaaggggactaaaacTGACAAATGTTAAAAACACTATTAGCAT | X | 488 |
| XLcr-516 | gatttagactaccccaaaaacgaaggggactaaaacAATGTTAAAAACACTATTAGCATAAGCA | X | 489 |
| XLcr-517 | gatttagactaccccaaaaacgaaggggactaaaacTGACAGCTTGACAAATGTTAAAAACACT | X | 490 |
| XLcr-518 | gatttagactaccccaaaaacgaaggggactaaaacCAGCTTGACAAATGTTAAAAACACTATT | X | 491 |
| XLcr-519 | gatttagactaccccaaaaacgaaggggactaaaacAATCAAATCCAATAGAATGATGCCAACA | X | 492 |
| XLcr-520 | gatttagactaccccaaaaacgaaggggactaaaacATCAAATCCAATAGAATGATGCCAACAG | X | 493 |
| XLcr-521 | gatttagactaccccaaaaacgaaggggactaaaacTAATCAAATCCAATAGAATGATGCCAAC | X | 494 |
| XLcr-522 | gatttagactaccccaaaaacgaaggggactaaaacACACGCTTAACAAAGCACTCGTGGACAG | X | 495 |
| XLcr-523 | gatttagactaccccaaaaacgaaggggactaaaacCGCTTAACAAAGCACTCGTGGACAGCTA | X | 496 |
| XLcr-524 | gatttagactaccccaaaaacgaaggggactaaaacCCGCATTAATCTTCAGTTCATCACCAAT | X | 497 |
| XLcr-525 | gatttagactaccccaaaaacgaaggggactaaaacACAAGCCGCATTAATCTTCAGTTCATCA | X | 498 |
| XLcr-526 | gatttagactaccccaaaaacgaaggggactaaaacACACCTAGTCATGATTGCATCACAACTA | X | 499 |
| XLcr-527 | gatttagactaccccaaaaacgaaggggactaaaacAGACACCTAGTCATGATTGCATCACAAC | X | 500 |
| XLcr-528 | gatttagactaccccaaaaacgaaggggactaaaacCAGCTAGACACCTAGTCATGATTGCATC | X | 501 |
| XLcr-529 | gatttagactaccccaaaaacgaaggggactaaaacACCTACAAAGCAACCATGATCTGTATTG | — | 502 |
| XLcr-530 | gatttagactaccccaaaaacgaaggggactaaaacACACGCTTAACAAAGCACTCGTGGACAG | — | 503 |
| XLcr-531 | gatttagactaccccaaaaacgaaggggactaaaacACGCTTAACAAAGCACTCGTGGACAGCT | — | 504 |
| XLcr-532 | gatttagactaccccaaaaacgaaggggactaaaacTCACAACTAGCTACATGTGCATTACCAT | X | 505 |
| XLcr-533 | gatttagactaccccaaaaacgaaggggactaaaacCACAACTAGCTACATGTGCATTACCATG | — | 506 |
| XLcr-534 | gatttagactaccccaaaaacgaaggggactaaaacATTTGATTACGTCTATAATCCGTTTATG | — | 507 |
| XLcr-535 | gatttagactaccccaaaaacgaaggggactaaaacGATCATGGTTGCTTTGTAGGTTACCTGT | — | 508 |
| XLcr-536 | gatttagactaccccaaaaacgaaggggactaaaacCAGATCATGGTTGCTTTGTAGGTTACCT | — | 509 |
| XLcr-537 | gatttagactaccccaaaaacgaaggggactaaaacGCTTTTCCACTGCTTCAGACACTTATGC | — | 510 |
| XLcr-538 | gatttagactaccccaaaaacgaaggggactaaaacATTATAGGATATTCAATAGTCCAGTCAA | X | 511 |
| XLcr-539 | gatttagactaccccaaaaacgaaggggactaaaacCCAATTATAGGATATTCAATAGTCCAGT | X | 512 |
| XLcr-540 | gatttagactaccccaaaaacgaaggggactaaaacGCTTTAACAACCATGTGTTGAACCTTTC | X | 513 |
| XLcr-541 | gatttagactaccccaaaaacgaaggggactaaaacGCAGCTTTAACAACCATGTGTTGAACCT | X | 514 |
| XLcr-542 | gatttagactaccccaaaaacgaaggggactaaaacCTTTAACAACCATGTGTTGAACCTTTCT | X | 515 |
| MKW0160 | gatttagactaccccaaaaacgaaggggactaaaacACCTCATGGTCATGTTATGGTTGAGCTG | — | 516 |
| MKW0161 | gatttagactaccccaaaaacgaaggggactaaaacCAGCTCAACCATAACATGACCATGAGGT | — | 517 |
| MKW0162 | gatttagactaccccaaaaacgaaggggactaaaacTGGTCATGTTATGGTTGAGCTGGTAGCA | — | 518 |
| MKW0163 | gatttagactaccccaaaaacgaaggggactaaaacTGCTACCAGCTCAACCATAACATGACCA | — | 519 |
| MKW0164 | gatttagactaccccaaaaacgaaggggactaaaacCGAACTGCACCTCATGGTCATGTTATGG | — | 520 |
| MKW0165 | gatttagactaccccaaaaacgaaggggactaaaacCCATAACATGACCATGAGGTGCAGTTCG | — | 521 |
| crRNA N1-1 | gatttagactaccccaaaaacgaaggggactaaaacGCACCCCGCATTACGTTTGGTGGACCCT | X | 522 |
| crRNA N1-2 | gatttagactaccccaaaaacgaaggggactaaaacAGGGTCCACCAAACGTAATGCGGGGTGC | X | 523 |
| crRNA N2-1 | gatttagactaccccaaaaacgaaggggactaaaacTGCACAATTTGCCCCCAGCGCTTCAGCG | X | 524 |
| crRNA N2-2 | gatttagactaccccaaaaacgaaggggactaaaacCGCTGAAGCGCTGGGGGCAAATTGTGCA | X | 525 |
| crRNA N3-1 | gatttagactaccccaaaaacgaaggggactaaaacATCACATTGGCACCCGCAATCCTGCTAA | — | 526 |
| crRNA N3-1 | gatttagactaccccaaaaacgaaggggactaaaacTTAGCAGGATTGCGGGTGCCAATGTGAT | — | 527 |

[0212] Certain guides were tested in combination with LAMP primer sets. Each guide tested was ranked as either 4: No detection; 3: Poor detection; 2: Good detection; or 1: Best detection. The results of the guide screening are demonstrated in Table 24.

TABLE 24

| target/primer | | | | | | | | | |
|---|---|---|---|---|---|---|---|---|---|
| sets | crRNA | 3000 copies | | 30 copies | | NTC | | S/N | RANK |
| B3 (orf1ab) | XLcr-507 | 381560 | 606255 | 751128 | 479722 | 11912 | 11033 | 53.6435 | 1 |
| B3 (orf1ab) | XLcr-506 | 159355 | 242958 | 362670 | 283619 | 12702 | 12853 | 25.2901 | 2 |
| B3 (orf1ab) | XLcr-505 | 84626 | 27520 | 13134 | 12996 | 11661 | 9565 | 1.23104 | 4 |
| B5 (orf1ab) | XLcr-509 | 596771 | 655653 | 626136 | 700660 | 11049 | 11547 | 58.7182 | 1 |
| B5 (orf1ab) | XLcr-510 | 500593 | 583394 | 624045 | 612371 | 13989 | 13380 | 45.1758 | 2 |
| B5 (orf1ab) | XLcr-512 | 38997 | 50342 | 79652 | 133126 | 12817 | 12506 | 8.40256 | 3 |
| CN-4B7 (N) | MKW0307 | 193718 | 158289 | 163775 | 172492 | 5365 | 5149 | 31.9828 | 2 |
| B5 (orf1ab) | XLcr-511 | 12617 | 15145 | 19248 | 27464 | 11217 | 11329 | 2.07185 | 4 |
| HK5 (orf1ab) | XLcr-530 | 808713 | 702139 | 727598 | 727101 | 8336 | 8819 | 84.7974 | 1 |
| HK5 (orf1ab) | XLcr-531 | 743506 | 735770 | 671386 | 575016 | 9777 | 8956 | 66.5351 | 2 |
| HK5 (orf1ab) | XLcr-529 | 1019348 | 581204 | 750566 | 660271 | 16473 | 16749 | 42.4669 | 2 |
| HK7-B7 | XLcr-534 | 788340 | 744356 | 666083 | 695888 | 12366 | 11219 | 57.7473 | 2 |
| (orf1ab) | | | | | | | | | |
| HK7-F7 | XLcr-535 | 866522 | 757465 | 678074 | 730362 | 9309 | 8150 | 80.6711 | 1 |
| (orf1ab) | | | | | | | | | |
| CN-4B7 (N) | MKW0306 | 358246 | 318146 | 278357 | 29721 | 5229 | 5164 | 29.6428 | 2 |
| HK7-F7 | XLcr-536 | 949197 | 885495 | 786778 | 740809 | 10180 | 9335 | 78.2776 | 1 |
| (orf1ab) | | | | | | | | | |
| CN-4B7 (N) | MKW0304 | 117477 | 132281 | 132603 | 126557 | 5861 | 5830 | 22.1675 | 2 |
| HK7-F7 | XLcr-534 | 960662 | 817735 | 779298 | 689392 | 13810 | 12804 | 55.1849 | 2 |
| (orf1ab) | | | | | | | | | |
| HK7-F7 | XLcr-537 | 864567 | 752316 | 755534 | 679622 | 18715 | 19172 | 37.8799 | 2 |
| (orf1ab) | | | | | | | | | |
| CN-4B7 (N) | MKW0303 | 112354 | 102155 | 71727 | 93316 | 5624 | 5472 | 14.8741 | 3 |
| CN-4F7 (N) | MKW0304 | 235526 | 220675 | 237769 | 251256 | 5856 | 5720 | 42.2447 | 2 |
| CN-4F7 (N) | MKW0306 | 228295 | 211651 | 132373 | 166404 | 5417 | 5155 | 28.2612 | 2 |
| CN-4F7 (N) | MKW0303 | 76253 | 57912 | 66575 | 71504 | 5846 | 5543 | 12.1239 | 3 |
| CN-4F7 (N) | MKW0307 | 244513 | 239678 | 238032 | 293421 | 73770 | 5403 | 6.71255 | 3 |
| JP13 (orf1ab) | MKW0162 | 776366 | 681657 | 9653 | 667011 | 9754 | 9637 | 34.8958 | 2 |
| JP13 (orf1ab) | MKW0160 | 804053 | 860405 | 16386 | 686270 | 13490 | 12905 | 26.6208 | 2 |
| JP2 (orf1ab) | MKW0163 | 785006 | 669887 | 749394 | 698177 | 9265 | 9736 | 76.1839 | 1 |
| CN-5B7 (N) | MKW0303 | 54150 | 42947 | 42340 | 45260 | 5195 | 33100 | 2.2875 | 4 |
| JP2 (orf1ab) | MKW0162 | 900163 | 796992 | 807423 | 792384 | 15817 | 13983 | 53.6848 | 2 |
| CN-5B7 (N) | MKW0306 | 356470 | 342436 | 317549 | 322836 | 5349 | 322337 | 1.95426 | 4 |
| CN-5F7 (N) | MKW0306 | 322802 | 302853 | 294700 | 305699 | 5273 | 5060 | 58.105 | 2 |
| CN-5F7 (N) | MKW0303 | 24608 | 22195 | 25378 | 20977 | 5448 | 5339 | 4.2973 | 3 |
| JP2 (orf1ab) | MKW0160 | 615770 | 445162 | 405453 | 660643 | 12836 | 14247 | 39.364 | 2 |
| N2-3 (N) | MKW0301 | 139665 | 86572 | 87309 | 67359 | 5199 | 59696 | 2.38337 | 4 |
| N2-3 (N) | MKW0300 | 194311 | 185570 | 154457 | 170884 | 5926 | 145851 | 2.14355 | 4 |
| N2-8 (N) | MKW0300 | 309406 | 218624 | 176785 | 232912 | 6234 | 6268 | 32.7705 | 2 |
| JP2 (orf1ab) | MKW0161 | 788645 | 713904 | 702131 | 704646 | 35679 | 35324 | 19.8129 | 3 |
| N2-8 (N) | MKW0301 | 122293 | 91069 | 91177 | 88135 | 5602 | 5495 | 16.1593 | 3 |
| N2-8 (N) | MKW0302 | 80342 | 39161 | 49717 | 42488 | 5640 | 5411 | 8.34392 | 3 |
| N2-8 (N) | MKW0299 | 8398 | 7396 | 7883 | 6907 | 4111 | 4682 | 1.68202 | 4 |
| JP5 (orf1ab) | MKW0165 | 696060 | 682256 | 15141 | 719209 | 13834 | 15635 | 24.9194 | 2 |
| N2-8 (N) | MKW0298 | 14876 | 8856 | 7590 | 3456 | 3843 | 4707 | 1.29193 | 4 |
| N2-9 (N) | MKW0300 | 320588 | 267128 | 270173 | 273597 | 6644 | 7594 | 38.1927 | 2 |
| N2-9 (N) | MKW0301 | 205854 | 162351 | 148890 | 198734 | 5822 | 5303 | 31.2498 | 2 |
| JP5 (orf1ab) | MKW0164 | 63738 | 55591 | 11900 | 52679 | 12010 | 11523 | 2.74419 | 4 |
| N2-9 (N) | MKW0299 | 6750 | 6278 | 6013 | 6067 | 5151 | 5076 | 1.18119 | 4 |
| N2-9 (N) | MKW0298 | 5850 | 5314 | 5016 | 5075 | 4809 | 4695 | 1.06176 | 4 |

This screening demonstrated the empirical identification of unique sets of LAMP primers and guide polynucleotides for detecting the presence of SARS-CoV-2.

### Example 7: Cross Reactivity Study

[0213] This example demonstrates that methods described herein are sensitive and specific. Specifically, the present example demonstrates that the methods described herein do not result in false positive detection of SARS-CoV-2 due to cross reactivity.

[0214] Cross-Reactivity Pools: The cross-reactivity panel were tested in five pools, each consisting of two organisms. To create the two panel-member pools, the stock concentration of each organism was diluted in nuclease-free water following the scheme in worksheet “Cross Reactivity Calculations.” The final concentration for each organism within the pool will be 2×10⁴ genome equivalents/μL (for bacteria and yeast) or 2×10³ genome equivalents/μL (for viruses), for a final assay concentration of 10⁶ genome equivalents/mL of VTM for bacteria and yeast, or 10⁵ genome equivalents/mL of VTM for viruses. Pools may be prepared in advance of the study and stored at a temperature at or below negative 70° C.

[0215] Samples: Each sample tested in this study was created by the addition of 10 microliters of the pooled, diluted organism stock (described above) to 200 microliters of lysis-treated negative matrix (e.g. 200 microliters of the NM AFTER the addition of 225 microliters of the PureLink™ lysis buffer and Proteinase K, and incubation at 56° C. for 15 minutes). This contrived sample was then extracted using the PureLink™ Viral DNA/RNA Mini Kit, following the manufacturer's instructions with a final elution volume of 30 microliters. Eight microliters of this eluted sample was used as template for each of the two SARS-CoV-2 analytes targeted by the Sherlock™ CRISPR SARS-CoV-2 kit (i.e., ORF1ab and N target analytes, and the RNaseP control). Three replicate aliquots of each eluted sample will be tested.

[0216] Controls: i. Extraction Control: RNaseP detection serves as an extraction control in the absence of a SARS-CoV-2 signal. ii. No Template Control: A “no input RNA” reaction is set up as a negative control for amplification and to determine background fluorescence levels in the Cas detection reaction. A negative control was performed for each LAMP primer set and each guide to be tested. The negative control was created by replacing the eight microliter template volume in the LAMP reaction with an equal volume of nuclease-free water. iii. Positive Control: A positive control for amplification and detection of the SARS-CoV-2 target analytes will be performed for each ORF1ab and N LAMP primer set and each ORF1ab and N guide to be tested. The positive control is created by replacing the eight microliter template volume in the LAMP reactions with an equal volume of viral genomic RNA extracted from cultured SARS-CoV-2 virus propagated in Vero cells, stabilized in Trizol and transported to Sherlock Biosciences. This viral stock was quantified by digital PCR and diluted to a concentration of 4800 copies per microliter in nuclease free water, aliquoted for single use.

[0217] The cross reactivity of each target primer and guide set was independently determined under this protocol. Five organism pools were created and used to perform the in vitro cross-reactivity study. Each organism pool consisted of nucleic acid from two organisms. Samples will be created by spiking SARS-CoV-2 Negative Matrix with quantified, pooled stocks of extracted nucleic acids from two organisms at clinically relevant concentrations. Three replicate aliquots from each organism pool were tested using the Sherlock™ CRISPR SARS-CoV-2 kit.

[0218] Organism pool creation: Quantified organism stock pools described in Table 25 below were prepared Ten microliters of each pooled, quantified organism stock was spiked into 200 microliters of negative matrix after addition of 225 microliters of the PureLink™ lysis buffer/Proteinase K, and incubation at 56° C. for 15 minutes.

TABLE 25
Organism Stock Pool Concentrations Organism Pool

| | | | Genome | Genome |
|---|---|---|---|---|
| | | | copies/ul | copies/mL |
| | | | pooled | contrived |
| | Organism | Source | organism stock | clinical sample |
| 1 | Human | ATCC ® VR-740D | 2.0 × 10³ | 1.0 × 10⁵ |
| | coronavirus 229E | | | |
| | Human | ATCC ® VR-1558D | 2.0 × 10³ | 1.0 × 10⁵ |
| | coronavirus OC43 | | | |
| 2 | Human | ATCC ® VR-3262SD | 2.0 × 10³ | 1.0 × 10⁵ |
| | coronavirus HKU1 | | | |
| | Human | ATCC-3263SD | 2.0 × 10³ | 1.0 × 10⁵ |
| | coronavirus NL63 | | | |
| 3 | Influenza A | VR-95DQ | 2.0 × 10³ | 1.0 × 10⁵ |
| | Influenza B | VR-1885DQ | 2.0 × 10³ | 1.0 × 10⁵ |
| 4 | Respiratory | ATCC ® VR-1580DQ | 2.0 × 10³ | 1.0 × 10⁵ |
| | syncytial virus | | | |
| | Pseudomonas | ATCC ® 27853D-5 | 2.0 × 10⁴ | 1.0 × 10⁶ |
| | aeruginosa | | | |
| 5 | Staphylococcus | ATCC ® 12228D-5 | 2.0 × 10⁴ | 1.0 × 10⁶ |
| | epidermis | | | |
| | Candida albicans | ATCC ® 10231D-5 | 2.0 × 10⁴ | 1.0 × 10⁶ |

[0219] LAMP reactions were performed. For each extracted sample, one LAMP reaction was performed for each of three primer sets. Additionally, a positive control for detection of SARS-CoV-2 targets was included as described (consisting of previously extracted viral RNA at 4800 cp/μL). One negative control (consisting of nuclease-free water instead of template, as described) was performed for each of the three LAMP Primer Set and Cas reactions.

[0220] Interpretation of test sample results: 1. Target (N, Orf1ab, RNaseP) interpretation: A sample was considered positive for a target if the Cas signal increased ≥5-fold at the T10 reading over a valid Negative Control (“no RNA added”) for that target. SARS-CoV-2 (COVID-19) Positive Result interpretation: A sample was positive for COVID-19 if at T10, a contrived sample's fluorescent Cas signal is ≥5-fold at the T10 reading over a valid Negative control's fluorescent Cas signal for one or more of SARS-CoV-2 target analytes (i.e., N or ORF1ab). SARS-CoV-2 (COVID-19) Negative Result interpretations: A sample was negative for COVID-19 if at T10: a. a contrived sample's fluorescent signal was less than 5-fold greater than a valid Negative Control signal for both SARS-CoV-2 target analytes b. AND the RNaseP signal was positive (the RNaseP fluorescent signal is at least 5-fold greater than a valid Negative Control signal at the T10 reading). 4. Invalid Results interpretation: A specimen was invalid if at the T10 reading: a. a contrived sample's fluorescent signal is less than 5-fold greater than a valid Negative Control signal for both SARS-CoV-2 (N and ORF1ab) target analytes at the T10 reading b. AND the RNaseP signal was less than 5-fold greater than a valid Negative Control signal at the T10 reading. Any sample with an invalid test result may be retested starting at the extraction step.

[0221] Statistical/Analysis Methods, Sample Size and Acceptance Criteria: If 0/3 replicates for an organism pool were positive for both SARS-CoV-2 targets, all organisms in that pool were said to show no cross-reactivity with the Sherlock™ CRISPR SARS-CoV-2 kit. a. Invalid samples were excluded from the result analysis and retested. b. In the event that a positive signal for one or more SARS-CoV-2 targets was detected for any replicate of a pool, each organism from that pool was tested individually with three (n=3) replicates following the protocol outlined above for the testing of organism pools. i. Organisms that show 0/3 replicates with a positive detection for both SARS-CoV-2 target analytes were said to show no cross-reactivity with the Sherlock™ CRISPR SARS-CoV-2 kit. ii. Organisms that show N=1 to 3 replicates with a positive detection for either SARS-CoV-2 target were said to potentially cross-react with the Sherlock™ CRISPR SARS-CoV-2 kit. Serial dilutions of the “reactive” organism may be tested in triplicate until 0/3 replicates are negative for SARS-CoV-2 detection.

[0222] Wet testing against high risk pathogenic organisms of the respiratory tract selected based on disease prevalence, disease risk, homology to assay specific targets and homology to SARS-CoV-2 genome was performed to confirm the results of in silico analysis. Each organism identified below was tested in triplicate with the Sherlock™ CRISPR SARS-CoV-2 kit by spiking diluted organism stock into lysis-treated pooled nasopharyngeal swab matrix. All replicates were negative for SARS-CoV-2.

| Organism | ATCC Cat. Number | Concentration | ORF1ab | N | RNaseP |
|---|---|---|---|---|---|
| Human coronavirus 229E | ATCC ® VR-740D | 1 × 10⁵ copies/mL | 0/3 | 0/3 | 3/3 |
| Human coronavirus OC43 | ATCC ® VR-1558D | 1 × 10⁵ copies/mL | 0/3 | 0/3 | 3/3 |
| Human coronavirus HKU1 | ATCC ® VR-3262SD | 1 × 10⁵ copies/mL | 0/3 | 0/3 | 3/3 |
| Human coronavirus NL63 | ATCC ® 3263SD | 1 × 10⁵ copies/mL | 0/3 | 0/3 | 3/3 |
| Influenza A | VR-95DQ | 1 × 10⁵ copies/mL | 0/3 | 0/3 | 3/3 |
| Influenza B | VR-1885DQ | 1 × 10⁵ copies/mL | 0/3 | 0/3 | 3/3 |
| Respiratory syncytial virus | ATCC ® VR-1580DQ | 1 × 10⁵ copies/mL | 0/3 | 0/3 | 3/3 |
| Pseudomonas aeruginosa | ATCC ® 27853D-5 | 1 × 10⁶ copies/mL | 0/3 | 0/3 | 3/3 |
| Staphylococcus epidermis | ATCC ® 12228D-5 | 1 × 10⁶ copies/mL | 0/3 | 0/3 | 3/3 |
| Candida albicans | ATCC ® 10231D-5 | 1 × 10⁶ copies/mL | 0/3 | 0/3 | 3/3 |

### Example 8: Limit of Detection Testing for Pooled Saliva Samples

[0223] The present example describes tests for determination of the limit of detection of the SARS-CoV-2 diagnostic described herein using saliva samples.

[0224] To test limits of detection of saliva using diagnostic methods described herein, pooled human saliva samples were added 1:1 to Zymo DNA/RNA Saliva Kit (R1210-1). 200 μl of the pooled saliva was then spiked with SARS-CoV-2 positive control (SeraCare 0505-129). RNA was then extracted from the positive control spiked saliva samples using Purelink Extraction Kit as described herein and eluted in 30 ul. Table 26 demonstrates sensitive detection of SARS-CoV-2 extracted from saliva.

TABLE 26

| Saliva/Zymo Preservative | | | |
|---|---|---|---|
| Sample Concentration | N | Orf | Sherlock Positive |
| 12 | 3/3 | 3/3 | 3/3 |
| 4 | 3/3 | 3/3 | 3/3 |
| 2 | 3/3 | 3/3 | 3/3 |
| 1.5 | 5/6 | 6/6 | 6/6 |
| 1 | 3/3 | 3/3 | 3/3 |
| 0.75 | 6/6 | 4/6 | 6/6 |
| 0.375 | 1/3 | 2/3 | 2/3 |
| 0.1875 | 0/3 | 1/3 | 1/3 |
| 0 | 0/7 | 0/7 | 0/7 |

[0225] To further demonstrate the capability of the assay described herein to detect SARS-CoV-2 in saliva the diagnostic methods and compositions described herein were tested on saliva without RNA extraction. Pooled saliva spiked with SARS-CoV-2 positive control was either mixed 1:1 with Quick Extract DNA Buffer (15 ul Quick Extract DNA Buffer to 15 ul of Saliva+SeraCare positive control) heated at 65° C. for 6 min, heated at 98° C. 3 min, and cooled to 4° C. or 3 ul of Proteinase K and 12 ul of H20 was added to 15 ul of Saliva+Preservative+Seracare then heated at 55° C. for 15 min, 98° C. for 3 min, and cooled to 4° C. Tables 27 and 28 demonstrate sensitive detection of SARS-CoV-2 extracted from saliva.

TABLE 27

| | |
|---|---|
| N | Orf |

Quick Extract DNA

| | | | | | |
|---|---|---|---|---|---|
| 50 | cp/ul | 200 | cp/rxn | 3/3 | 2/3 |
| 25 | cp/ul | 100 | cp/rxn | 2/3 | 3/3 |
| 5 | cp/ul | 20 | cp/rxn | 0/3 | 1/3 |

| | | | |
|---|---|---|---|
| 0 | 0 | 0/1 | 0/1 |

Heating + Proteinase K

| | | | | | |
|---|---|---|---|---|---|
| 50 | cp/ul | 200 | cp/rxn | 3/3 | 1/3 |
| 25 | cp/ul | 100 | cp/rxn | 3/3 | 1/3 |
| 5 | cp/ul | 20 | cp/rxn | 2/3 | 1/3 |

| | | | |
|---|---|---|---|
| 0 | 0 | 0/1 | 0/1 |

Heating Only

| | | | | | |
|---|---|---|---|---|---|
| 50 | cp/ul | 400 | cp/rxn | 3/3 | 1/3 |
| 25 | cp/ul | 200 | cp/rxn | 3/3 | 0/3 |
| 5 | cp/ul | 40 | cp/rxn | 0/3 | 0/3 |

| | | | |
|---|---|---|---|
| 0 | 0 | 0/1 | 0/1 |

TABLE 28

Sherlock Positive

| Sample | Quick | |
|---|---|---|
| Concentration | Extract | Heating + |
| copies/ul | DNA | Proteinase K |
| 50 | 3/3 | 3/3 |
| 25 | 3/3 | 3/3 |
| 5 | 1/3 | 2/3 |
| 0 | 0/1 | 0/1 |

### Example 9: Automated Workflow

[0226] The present example demonstrates, as described herein, that steps of the diagnostic assay of the present disclosure can be combined to improve speed, accuracy and ease of workflow. FIG. 11 demonstrates an efficient workflow in which certain steps are combined and performed sequentially in a single vessel. In this exemplary workflow an amplification reaction (e.g., LAMP) is prepared (1), then aliquoted to a 384 well plate (2). Following the amplification reaction (3) a CRISPR/Cas collateral activity assay is prepared (4) and aliquoted to the same 384 well plate for activation of CRISPR/Cas collateral activity (5) and detection of associated signal (6).

[0227] Each sample analyzed in the automated process disclosed herein was plated in duplicate in a 384 well plate. 7 μL of lysis solution (e.g., proteinase K or Quick Extract) was added to each well of the 384 well plate. Subsequently, 7 μL of sample was added to each well of the 384 well plate. The plate was incubated at 55° C. for 15 min followed by a 3 minute incubation at 98° C. 8 μL of the LAMP amplification reagent was added to each well. One of the two duplicate samples received SARS-Cov-2 LAMP amplification reagent and the remaining duplicate received the control LAMP amplification reagent. 20 μL of mineral oil was added to each well of the 384 well plate. The plate was incubated at 61° C. for 40 minutes. 5 μL of SARS-CoV-2 Cas detection reagent (see “Target CRISPR Cas Master Mix Recipe”) was added to SARS-CoV-2 target containing wells and 5 μL of control Cas detection reagent was added to control target containing wells. Signal detection was completed on a fluorescent plate reader at 37° C. with excitation-emission of 485 and 528 nanometers, respectively. Notably, the plate was not cooled to 4° C., but room temperature after the LAMP reaction.

Target CRISPR Cas Master Mix Recipe

| | | |
|---|---|---|
| Reagent | Volume per Reaction | Volume Total |

| | | | |
|---|---|---|---|
| Premix | 7.5 | μL | 7.5 μL × (12 + 1)= |
| crRNA N | 2.25 | uL | 2.25 uL × (12 + 1)= |
| crRNA O | 2.25 | μL | 2.25 μL × (12 + 1)= |
| MgCl2 | 0.23 | μL | 0.23 μL × (12 + 1)= |
| Total Volume | 12.23 | μL | 12.23 μL × (12 + 1)= |

[0228] FIG. 12 demonstrates that combining performing the amplification, CRISPR/cas activation and detection on a single plate results in a simpler workflow as well as reliable results. Notably, combining a cRNA detecting N and a cRNA detecting ORF1ab in a single detection reaction results in sensitive detection of SARS-CoV-2. FIG. 13 demonstrates significant differences between RFUs determined 10 and 20 minutes after detection is initiated in the combined workflow which is not observed otherwise.

[0229] Additionally, FIG. 14 shows a comparison of SARS-CoV-2 containing saliva samples extracted using methods described herein and assayed using the combined workflow (“new workflow”). FIG. 15, shows further confirmation of the sensitivity of the methods described herein. Saliva samples (10 μL of pooled saliva at 50, 25, 10, 5 and 0 copies/μL sample) were assayed using the 384 well plate workflow described herein. Briefly proteinase K (PK) or Quick Extract (QE) we added to the sample and heated at 65° C. for 6 min and 98° C. for 3 min. Then a LAMP master mix was added at heated at 61° C. for 40 min. A Cas master mix was then added and the plate was incubated on a plate reader at 37° C. while signal was detected. Notably the combined workflow provides sensitive detection of SARS-CoV-2.

### Example 10: SARS-CoV-2 Detection from Patient Nasopharyngeal Swabs

[0230] The present example further demonstrates, as described herein, the sensitivity and specificity of the SHERLOCK CRISPR SARS-CoV-2 kit. The present example describes detection of SARS-CoV-2 from a total of 20 COVID-19 patient samples (10 positive and 10 negative) from nasopharyngeal swabs. Selected COVID-19 patient samples were tested on previously validated RT-qPCR assays (CDC, Abbott, m2000). Positive samples were selected based on a broad range of cycle threshold (Ct) values, comprising an average of low (μ=7.11), mid (μ=17.2), and high (μ=27.9) Ct values. Nucleic acids extraction from nasopharyngeal swab patient samples were performed using EZ1 Advanced system (Qiagen). Following the SHERLOCK CRISPR SARS-CoV-2 kit instructions, the extracted material was subjected to reverse transcriptase loop-mediated amplification. Amplified products were incubated with Cas13a enzyme complexed with CRISPR guide RNAs specific to SARS-CoV-2 targets. Fluorescent read outs of the cleaved reporter molecules were taken at 2.5 minute intervals for a total of 10 minutes on a microplate reader (BioTek). Data output of relative fluorescent unit ratios were normalized to a no-template control. All 20 COVID-19 patient samples were correctly diagnosed with up to 100% accuracy. All controls, including RNase P, showed expected findings with 5500 copies/μl detected for diluted positive control isolate (BEI). For COVID-19 positive samples, normalized ratios ranged from 16.45-49.17 and 33.82-48.15 for N and ORF1ab gene targets, respectively. Fluorescence ratios on negative samples ranged from 0.54-1.28 and 0.84-4.93 for N and ORF1ab gene targets, respectively. Determined ratios were sufficiently greater or less than the pre-established 5-fold change in fluorescence read output, obviating interpretation of any borderline results.

### Example 11: Real Time Multiplexed SARS-CoV-2 Detection

[0231] The present example confirms that thermostable Cas enzymes as described herein permit multiple reaction steps to be performed in a single reaction vessel (e.g., “one pot”). Use of thermostable Cas reduces or eliminates certain processing and/or transfer steps. The present example demonstrates that with use of thermostable Cas all reaction steps beyond nucleic acid isolation may be performed in a single vessel.

[0232] The present example demonstrates that use of a new thermostable Cas12 protein described herein (SLK-9 (also referred to as rs9, interchangeably; SEQ ID NO: 15) that is compatible with LAMP provides an improved Real Time SHERLOCK system (RT-SHERLOCK) that dramatically simplified the workflow from a two-step workflow to a single reaction, meanwhile providing real time signal readout. Furthermore, combination of two different CRISPR-Cas systems (SLK-9; SEQ ID NO:15 and AacCas12b; SEQ ID NO: 3) generated the first real time multiplexed CRISPR based diagnostic platform (Duplex Aac/rs9-cas12 Real Time Sherlock; DARTS) that is capable of detecting SARS-CoV-2 RNA and human RnaseP internal control simultaneously.

[0233] The one step workflow of RT-SHERLOCK and DARTS is performed by adding extracted or unextracted COVID-19 patient anterior nasal swab or saliva samples into a reaction tube containing RT-SHERLOCK or DARTS reaction mix followed by monitoring fluorescence signal change at real time. Extracted samples were purified by Purelink extraction kit according to its protocol and eluted into water. Unextracted samples were simply heat lysed with addition of Proteinase K and RNAsecure (65 C 15 min, 95 C 10 min). An exemplary DARTS design (DARTSv1) is shown in Table 29 wherein DARTSv1 uses AacCas12b system to detect N gene and rs9 system to detect Rnase P (RP) internal control. FIG. 16 shows experimental data demonstrating the ability of the duplexed system to detect both SARS-CoV-2 and RP simultaneously.

TABLE 29

| DARTS design | Aac Cas12b | Rs9 cas12a |
|---|---|---|
| Target | SARS-CoV-2 N gene | RnaseP internal control |
| Reporter | polyT7-FAM | polyT7-FAM |
| | | polyC7-TexasRed |
| Fluorescence channel | x1-m1 | x1-m1 |
| | | x4-m4 |
| Temperature | 56 C. | |
| Guide RNA | Guide 1 (XL-A226) | Guide 2 (XL-374) |
| Primer set | CNFB | RP |

[0234] Initial evaluation of the limit of detection of DARTSv1 demonstrated that the LOD is 14-28 cp/μl (FIG. 17).

[0235] A further exemplary DARTS platform (DARTs v2) contained RT-LAMP reaction mix to provide sufficient reagent for duplexed LAMP amplification, two LAMP primer sets for N and RP, SLK9 enzymes with crRNA targeting N, AacCas enzyme with crRNA targeting RP, FAM-quencher modified T reporter, and HEX-quencher modified C reporter (FIGS. 18 and 19). DARTS is the first demonstration of a multiplexed real-time CRIPSR diagnostic platform. To use the DARTS assay, the only operational step by the user is to add samples into DARTS reaction and put the reaction into a device with fluorescence monitor and temperature control such as plate readers or qPCR instruments. The exemplary DARTS assay was conducted at 56° C., which is lower than optimal SLK9 reaction temperature to comprise for the weaker thermal stability of Aac system. In the reaction, when samples were added into DARTS, N or RP were amplified by corresponding LAMP primer sets, followed by the activation of corresponding Cas enzymes. When SLK9 is activated, it will cleave both C and T reporter, lighting up both FAM and HEX fluorescence. When Aac was activated, it only cleaved T reporter, lighting up only FAM fluorescence. The assay result interpretation follows simple and intuitive “two-line means positive, one-line means negative” rule: positive samples show ON signal in both FAM and HEX channel, negative samples show ON signal in FAM channel and OFF signal in HEX channel. Assays were determined as invalid if OFF signal are seen in FAM channel or both channels. The LOD for DARTSv2 was found to be 7-14 cp/μl (FIG. 19).

[0236] The RT-SHERLOCK and DARTS assays were evaluated on a combined total of 60 positive and negative patient samples with or without extraction, and achieved a 98% concordance to traditional RT-PCR (58 correctly identified out of 60 total; FIGS. 20 and 21). No false-positives were observed. The time-to-result can be as fast as 12 minutes depending on the patient samples and the utilized extraction methods. The RT-SHERLOCK analytical limits of detection are 0.5 copies/uL for extracted samples and 10-20 copies/μL for unextracted samples depending on sample type. The DARTS analytical limits of detection are 10 copies/uL for extracted samples and 60 copies/μL for unextracted samples.

[0237] Exemplary DARTS detection of clinical sample was performed by adding 10 μL or 5 μL pretreated clinical sample directly into a DARTS reaction mix and then measured on a QuantStudio 5 qPCR instrument for florescence readout at 56° C. An exemplary DARTS reaction mix is shown in Table 11-1.

TABLE 11-1

| | | | Amount per reaction (uL) | |
|---|---|---|---|---|
| | Stock | | Extracted | Unextracted |
| DARTS reaction mix | concentration | | sample | sample |
| Warmstart LAMP reaction | 2x | | 25 | 25 |
| mix (NEB) | | | | |
| CNFB primer mix | — | | 2.2 | 2.2 |
| RPFB primer mix | — | | 2.2 | 2.2 |
| Aac Cas12b enzyme | 2 | mg/mL | 1.2 | 1.2 |
| SLK9 Cas12a enzyme | 2.83 | mg/mL | 0.65 | 0.65 |
| AacCas12b crRNA for RP | 10 | uM | 2.6 | 2.6 |
| SLK9 Cas12a crRNA for N | 10 | uM | 0.6 | 0.6 |
| Reporter C | 20 | uM | 0.5 | 0.5 |
| Reporter T | 20 | uM | 0.5 | 0.5 |

| | | | |
|---|---|---|---|
| Water | — | 4.55 | 9.55 |
| Sample | — | 10 | 5 |
| Total volume | — | 50 | 50 |

[0238] An exemplary primer mix is shown in Table 11-2.

TABLE 11-2

| Primer mix | Stock concentration | Amount (uL) |
|---|---|---|
| F3 | 100 uM | 10 |
| B3 | 100 uM | 10 |
| FIP | 100 uM | 80 |
| BIP | 100 uM | 80 |
| LF | 100 uM | 20 |
| LB | 100 uM | 20 |
| Total volume | — | 220 |

[0239] Exemplary sequences for a DARTS reaction are shown in Table 11-3.

TABLE 11-3

| Name | Sequence |
|---|---|
| Aac Cas12b | GTCTAGAGGACAGAATTTTTCAACGGGTGTGCCAAT |
| crRNA for | GGCCACTTTCCAGGTGGCAAAGCCCGTTGAGCTTCT |
| RP | CAAATCTGAGAAGTGGCACAGTGGAGGAGTGTCTTT |
| | TCAA (SEQ ID NO: 742) |
| SLK9 Cas12a | AAUUUCUACUAUUGUAGAUCUCCUGCUAGAAUGGCU |
| crRNA for N | GGCAAUGGC (SEQ ID NO: 743) |
| CNFB | GCTTCTACGCAGAAGGGA (SEQ ID NO: 744) |
| primer: F3 | |
| CNFB | GTGACAGTTTGGCCTTGT (SEQ ID NO: 745) |
| primer: B3 | |
| CNFB | CTACTGCTGCCTGGAGTTGAATTCCTCTTCTCGTTC |
| primer: FIP | CTCATC (SEQ ID NO: 746) |
| CNFB | GCTTTGCTGCTGCTTGACAGTGTTGTTGGCCTTTAC |
| primer: BIP | CA (SEQ ID NO: 747) |
| CNFB | CTTGAACTGTTGCGACTACGT (SEQ ID |
| primer: LF | NO: 748) |
| CNFB | ATTGAACCAGCTTGAGAGCAAA (SEQ ID |
| primer: LB | NO: 749) |
| RPFB primer: | TTGATGAGCTGGAGCCA (SEQ ID NO: 750) |
| F3 | |
| RPFB primer: | CACCCTCAATGCAGAGTC (SEQ ID NO: 751) |
| B3 | |
| RPFB primer: | GTGTGACCCTGAAGACTCGGTTTTAGCCACTGACTC |
| FIP | GGATC (SEQ ID NO: 752) |
| RPFB primer: | CCTCCGTGATATGGCTCTTCGTTTTTTTCTTACATG |
| BIP | GCTCTGGTC (SEQ ID NO: 753) |
| RPFB primer: | ATGTGGATGGCTGAGTTGTT (SEQ ID |
| LF | NO: 754) |
| RPFB primer: | GGCATGCTGAGTACTGGACCTC (SEQ ID |
| LB | NO: 755) |
| Reporter C | /5TexRd-XN/CCCCCCC/3IAbRQSp/ (SEQ ID |
| | NO: 756) |
| Reporter T | /56-FAM/TTTTTTT/3IABkFQ/ (SEQ ID |
| | NO: 757) |

[0240] RT-SHERLOCK and DARTS assays based on a novel thermostable cas12a enzyme (SLK-9) can achieve PCR-like high sensitivity and specificity detecting SARS-CoV-2 RNA from clinical samples. The workflow is simple, rapid, high-throughput and automation compatible. The two assays have the potential to reduce current COVID-19 diagnostic assay turnaround time and improve the throughput to all laboratories increasing their testing capacity without sacrificing performance.

### EQUIVALENTS

[0241] Those skilled in the art will recognize, or be able to ascertain using no more than routine experimentation, many equivalents to the specific embodiments of the invention described herein. The scope of the present invention is not intended to be limited to the above Description, but rather is as set forth in the following claims:

LENGTHY TABLES
The patent application contains a lengthy table section. A copy of the table is available in electronic form from the USPTO web site (https://seqdata.uspto.gov/?pageRequest=docDetail&DocID=US20240052436A1). An electronic copy of the table will also be available from the USPTO upon request and payment of the fee set forth in 37 CFR 1.19(b)(3).

The application's sequence listing, which the Patent Office published only in electronic form, follows.

SEQUENCE LISTING (760 sequences)

SEQ ID NO: 1 - protein, 1225 aa, Thermoclostridium caenicola
MKITKRKWGEHHPPLYFYRDEDSGRLLAQNDRKQDYTDTLFNDIAQDTFERSLRNRLLKTPEKGDKRFYSNEIVKLVEKLCQGADVAEIMKSMERNEKLRPKNEKEIKNLKKQLDGTLSEYGKRYTAPEGAMTLNDALFYLVEGNPLKQAMAKAELGKIREALIKEKENRINRVRYSIKNNKIPLRIQEDGGITPNNDRAAWLLGLMKPADPAKGITDCYPLLGELEEVFDFDKLSKTLHEKISRCQGRPRSIAMAVDEALKQYLRELWEKSPSRQQDLKYYFQAVQEYFKDNFPIRTKRMGARLRQELLKDKTSLSRLLEPKHMANAVRRRLINQSTQMHILYGKLYAYCCGEDGRLLVNSETLQRIQVHEAVKKQAMTAVLWSISRLRYFYQFEDGDILSNKNPIKDFRDKFLRDTNKYTHEDVEACKEKLQDFFPLKELQEKIKEDAKGLQETDNKQADTTDFKAIGHIVRDDRKLCNQLLAECVSCIGELRHHIFHYKNVTLIQALKRIADKVKPEDLSVLRAIYLLDRRNLKKAFAKRISSMNLPLYYREDLLSRIFKKEGTAFFLYSAKIQMTPSFQRVYERGKNLRREFECERMKAEASNGQNGQDGDRLKWFRQLAAGDSADTHFNWAVEAYAESAADVENNVEFDTDVDAQRALRNLLLLIYRHHFLPEVQKDETLVTGKIHKVLERNRQLSEGQGPNQGKAHGYSVIEELYHEGMPLSDLMKQLQRRISETERESRELAQEKTDYAQRFILDIFAEAFNDFLEAHYGEEYLEIMSPRKDAEAAKKWVKESKTVDLKTSIDEKEPEGHLLVLYPVLRLLDERELGELQQQMIRYRTSLASWQGESNFSEEIRIAGQIEELTELVKLTEPEPQFAEEVWGKRAKEAFEDFIEGNMKNYEAFYLQSDNNTPVYRRNMSRLLRSGLMGVYQKVLASHKQALKRDYLLWSEKHWNVKDENGADISSAEQAQCLLQRLHRKYAESPSRFTEEDCKLYEKVLRRLEDYNQAVKNLSFSSLYEICVLNLEILSRWVGFVQDWERDMYFLLLAWVRQGKLDGIKEEDVRDIFSEGNIIRNLVDTLKGENMNAFESVYFPENKGSKYLGVRNDVAHLDLMRKNGWRLEAGKTCSVMEDYINRLRFLLSYDQKRMNAVTKTLQQIFDRHKVKIRFTVEKGGMLKIEDVTADKIVHLKGSRLSGIEIPSHGERFIDTLKALMVYPRG

SEQ ID NO: 2 - protein, 1217 aa, Thalassospira profundimaris
MRIIKPYGRSHVEGVATEQPRRKLRLNTRPDISRDIPGFAQSHDALIIAQWISAIDKIATKPKPDQKPTQRQMNLRTTLGDAAWQHLMAKNLLPAAKDPAIREKLHLIWQSKIAPWGASRPQEEKRGKPTPKGGWYERFCGALSPEAITQNVARQIAKDIYDHLYVAAKRKGREPVKQGESSNKPGKFKPDRKLSLIEERAESIAKNALRPGTHAPCPWGQDDQAIYEQAGDVATKIYDDARDYLEDKKRRSGNRNTSSVQYLPRDLAVKILYAQYGRVFGPDTTIKAALDEQQSLFALHTAIKDCYHRLVNDARKRHILRILPRNMAALFRLVRAQYDNRDINALIRLGKVIHYHAGEQGKDEHHGIRDYWPSQQDIQNSRFWGSDGQADIKRHEAFSRIWRHIIALASRTLHDWADPDSQKFTGDDDDILMRAGAIESNVWDAGRYERKCDVLFGAQASLFCGAEDFEKATLKQAITGTGNLRNATFHFKGKARFENELQRLADDVPVDVQSAIAALWQKDAEGRTRQIAETLQAVLAGHFLSERQNRHILATLMAAMAQPGDVPLPRLRRVLARHDSICQRGRILPLPPCPDRAKLEESPALTCQYTVLKMLYDGPFRAWLAQQNSTILNHYIDSTIARTNKAAQDMNGRKLAPAEKDLITARAADIPRLSVDEKMVDFLGRLTAATATEMRVQRGYQSDGEKAQKQAGYIGEFECDVIARAFSDFLGQSGFDFVLKLKADTPKPDAAQCDVAALIAPGDVPALTPQAWQQVLYFILHLVPVDDASRLLHQTRKWQALEKKGKDKEVKKEKDKEVKKEDEKPDIADLQSVLMLYLDMHDAKFTGGAALHGIEKFAEFFVEKADFRAVFPPQSLQDQDRSIPRRGLREIVRFGHLPLLQHMSGTVKITHDNVVAWQTARTPDATGTSPIARRQKQREELHALAVERPARFRNADLHNYMHALVDVIKHRQLSAQVTLSDQVRLHRLMMGVLGRLVDYAGLWERDLYFVLLALLYHHGVTPDDVLKGQGKRKLADGQVVEALKPKNRKAAAPVGVFDDLDHYGIYQDDRQSIRNGLSHFNMLRGGTAPDLSHWVNQTRRLVAHDRKLKNAVAKSVIEMLAREGFDLDWTIEPDSGKHILRHGKIRTRQAQHFQKSRIRIEKKSAKPDKNDTVKIRENLHGDAMVERVARLFAARAQKYRDITTEKRLDHLFLKPKG

SEQ ID NO: 3 - protein, 1129 aa, Alicyclobacillus acidoterrestris
MAVKSIKVKLRLDDMPEIRAGLWKLHKEVNAGVRYYTEWLSLLRQENLYRRSPNGDGEQECDKTAEECKAELLERLRARQVENGHRGPAGSDDELLQLARQLYELLVPQAIGAKGDAQQIARKFLSPLADKDAVGGLGIAKAGNKPRWVRMREAGEPGWEEEKEKAETRKSADRTADVLRALADFGLKPLMRVYTDSEMSSVEWKPLRKGQAVRTWDRDMFQQAIERMMSWESWNQRVGQEYAKLVEQKNRFEQKNFVGQEHLVHLVNQLQQDMKEASPGLESKEQTAHYVTGRALRGSDKVFEKWGKLAPDAPFDLYDAEIKNVQRRNTRRFGSHDLFAKLAEPEYQALWREDASFLTRYAVYNSILRKLNHAKMFATFTLPDATAHPIWTRFDKLGGNLHQYTFLFNEFGERRHAIRFHKLLKVENGVAREVDDVTVPISMSEQLDNLLPRDPNEPIALYFRDYGAEQHFTGEFGGAKIQCRRDQLAHMHRRRGARDVYLNVSVRVQSQSEARGERRPPYAAVFRLVGDNHRAFVHFDKLSDYLAEHPDDGKLGSEGLLSGLRVMSVDLGLRTSASISVFRVARKDELKPNSKGRVPFFFPIKGNDNLVAVHERSQLLKLPGETESKDLRAIREERQRTLRQLRTQLAYLRLLVRCGSEDVGRRERSWAKLIEQPVDAANHMTPDWREAFENELQKLKSLHGICSDKEWMDAVYESVRRVWRHMGKQVRDWRKDVRSGERPKIRGYAKDVVGGNSIEQIEYLERQYKFLKSWSFFGKVSGQVIRAEKGSRFAITLREHIDHAKEDRLKKLADRIIMEALGYVYALDERGKGKWVAKYPPCQLILLEELSEYQFNNDRPPSENNQLMQWSHRGVFQELINQAQVHDLLVGTMYAAFSSRFDARTGAPGIRCRRVPARCTQEHNPEPFPWWLNKFVVEHTLDACPLRADDLIPTGEGEIFVSPFSAEEGDFHQIHADLNAAQNLQQRLWSDFDISQIRLRCDWGEVDGELVLIPRLTGKRTADSYSNKVFYTNTGVTYYERERGKKRRKVFAQEKLSEEEAELLVEADEAREKSVVLMRDPSGIINRGNWTRQKEFWSMVNQRIEGYLVKQIRSRVPLQDSACENTGDI

SEQ ID NO: 4 - protein, 1147 aa, Alicyclobacillus kakegawensis
MAVKSIKVKLRLSECPDILAGMWQLHRATNAGVRYYTEWVSLMRQEILYSRGPDGGQQCYMTAEDCQRELLRRLRNRQLHNGRQDQPGTDADLLAISRRLYEILVLQSIGKRGDAQQIASSFLSPLVDPNSKGGRGEAKSGRKPAWQKMRDQGDPRWVAAREKYEQRKAVDPSKEILNSLDALGLRPLFAVFTETYRSGVDWKPLGKSQGVRTWDRDMFQQALERLMSWESWNRRVGEEYARLFQQKMKFEQEHFAEQSHLVKLARALEADMRAASQGFEAKRGTAHQITRRALRGADRVFEIWKSIPEEALFSQYDEVIRQVQAEKRRDFGSHDLFAKLAEPKYQPLWRADETFLTRYALYNGVLRDLEKARQFATFTLPDACVNPIWTRFESSQGSNLHKYEFLFDHLGPGRHAVRFQRLLVVESEGAKERDSVVVPVAPSGQLDKLVLREEEKSSVALHLHDTARPDGFMAEWAGAKLQYERSTLARKARRDKQGMRSWRRQPSMLMSAAQMLEDAKQAGDVYLNISVRVKSPSEVRGQRRPPYAALFRIDDKQRRVTVNYNKLSAYLEEHPDKQIPGAPGLLSGLRVMSVDLGLRTSASISVFRVAKKEEVEALGDGRPPHYYPIHGTDDLVAVHERSHLIQMPGETETKQLRKLREERQAVLRPLFAQLALLRLLVRCGAADERIRTRSWQRLTKQGREFTKRLTPSWREALELELTRLEAYCGRVPDDEWSRIVDRTVIALWRRMGKQVRDWRKQVKSGAKVKVKGYQLDVVGGNSLAQIDYLEQQYKFLRRWSFFARASGLVVRADRESHFAVALRQHIENAKRDRLKKLADRILMEALGYVYEASGPREGQWTAQHPPCQLIILEELSAYRFSDDRPPSENSKLMAWGHRGILEELVNQAQVHDVLVGTVYAAFSSRFDARTGAPGVRCRRVPARFVGATVDDSLPLWLTEFLDKHRLDKNLLRPDDVIPTGEGEFLVSPCGEEAARVRQVHADINAAQNLQRRLWQNFDITELRLRCDVKMGGEGTVLVPRVNNARAKQLFGKKVLVSQDGVTFFERSQTGGKPHSEKQTDLTDKELELIAEADEARAKSVVLFRDPSGHIGKGHWIRQREFWSLVKQRIESHTAERIRVRGVGSSLD

SEQ ID NO: 5 - protein, 1108 aa, Bacillus hisashii
MATRSFILKIEPNEEVKKGLWKTHEVLNHGIAYYMNILKLIRQEAIYEHHEQDPKNPKKVSKAEIQAELWDFVLKMQKCNSFTHEVDKDEVFNILRELYEELVPSSVEKKGEANQLSNKFLYPLVDPNSQSGKGTASSGRKPRWYNLKIAGDPSWEEEKKKWEEDKKKDPLAKILGKLAEYGLIPLFIPYTDSNEPIVKEIKWMEKSRNQSVRRLDKDMFIQALERFLSWESWNLKVKEEYEKVEKEYKTLEERIKEDIQALKALEQYEKERQEQLLRDTLNTNEYRLSKRGLRGWREIIQKWLKMDENEPSEKYLEVFKDYQRKHPREAGDYSVYEFLSKKENHFIWRNHPEYPYLYATFCEIDKKKKDAKQQATFTLADPINHPLWVRFEERSGSNLNKYRILTEQLHTEKLKKKLTVQLDRLIYPTESGGWEEKGKVDIVLLPSRQFYNQIFLDIEEKGKHAFTYKDESIKFPLKGTLGGARVQFDRDHLRRYPHKVESGNVGRIYFNMTVNIEPTESPVSKSLKIHRDDFPKVVNFKPKELTEWIKDSKGKKLKSGIESLEIGLRVMSIDLGQRQAAAASIFEVVDQKPDIEGKLFFPIKGTELYAVHRASFNIKLPGETLVKSREVLRKAREDNLKLMNQKLNFLRNVLHFQQFEDITEREKRVTKWISRQENSDVPLVYQDELIQIRELMYKPYKDWVAFLKQLHKRLEVEIGKEVKHWRKSLSDGRKGLYGISLKNIDEIDRTRKFLLRWSLRPTEPGEVRRLEPGQRFAIDQLNHLNALKEDRLKKMANTIIMHALGYCYDVRKKKWQAKNPACQIILFEDLSNYNPYEERSRFENSKLMKWSRREIPRQVALQGEIYGLQVGEVGAQFSSRFHAKTGSPGIRCSVVTKEKLQDNRFFKNLQREGRLTLDKIAVLKEGDLYPDKGGEKFISLSKDRKCVTTHADINAAQNLQKRFWTRTHGFYKVYCKAYQVDGQTVYIPESKDQKQKIIEEFGEGYFILKDGVYEWVNAGKLKIKKGSSKQSSSELVDSDILKDSFDLASELKGEKLMLYRDPSGNVFPSDKWMAAGVFFGKLERILISKLTNQYSISTIEDDSSKQSM

SEQ ID NO: 6 - protein, 1090 aa, Laceyella sediminis
MSIRSFKLKIKTKSGVNAEELRRGLWRTHQLINDGIAYYMNWLVLLRQEDLFIRNEETNEIEKRSKEEIQGELLERVHKQQQRNQWSGEVDDQTLLQTLRHLYEEIVPSVIGKSGNASLKARFFLGPLVDPNNKTTKDVSKSGPTPKWKKMKDAGDPNWVQEYEKYMAERQTLVRLEEMGLIPLFPMYTDEVGDIHWLPQASGYTRTWDRDMFQQAIERLLSWESWNRRVRERRAQFEKKTHDFASRFSESDVQWMNKLREYEAQQEKSLEENAFAPNEPYALTKKALRGWERVYHSWMRLDSAASEEAYWQEVATCQTAMRGEFGDPAIYQFLAQKENHDIWRGYPERVIDFAELNHLQRELRRAKEDATFTLPDSVDHPLWVRYEAPGGTNIHGYDLVQDTKRNLTLILDKFILPDENGSWHEVKKVPFSLAKSKQFHRQVWLQEEQKQKKREVVFYDYSTNLPHLGTLAGAKLQWDRNFLNKRTQQQIEETGEIGKVFFNISVDVRPAVEVKNGRLQNGLGKALTVLTHPDGTKIVTGWKAEQLEKWVGESGRVSSLGLDSLSEGLRVMSIDLGQRTSATVSVFEITKEAPDNPYKFFYQLEGTELFAVHQRSFLLALPGENPPQKIKQMREIRWKERNRIKQQVDQLSAILRLHKKVNEDERIQAIDKLLQKVASWQLNEEIATAWNQALSQLYSKAKENDLQWNQAIKNAHHQLEPVVGKQISLWRKDLSTGRQGIAGLSLWSIEELEATKKLLTRWSKRSREPGVVKRIERFETFAKQIQHHINQVKENRLKQLANLIVMTALGYKYDQEQKKWIEVYPACQVVLFENLRSYRFSYERSRRENKKLMEWSHRSIPKLVQMQGELFGLQVADVYAAYSSRYHGRTGAPGIRCHALTEADLRNETNIIHELIEAGFIKEEHRPYLQQGDLVPWSGGELFATLQKPYDNPRILTLHADINAAQNIQKRFWHPSMWFRVNCESVMEGEIVTYVPKNKTVHKKQGKTFRFVKVEGSDVYEWAKWSKNRNKNTFSSITERKPPSSMILFRDPSGTFFKEQEWVEQKTFWGKVQSMIQAYMKKTIVQRMEE

SEQ ID NO: 7 - protein, 1133 aa, Unknown
  source: /note="Description of Unknown: Cas12 sequence"
MFKKKLFDDEEFISLAQNQEESNALNAFKGFTTHFKDFQENRKNMYSEDKESTAIAYRIIHENLPVFITNNIRFEKIINELDRSNIHSIEKELKEELANNKLKDIFNIEYFQNTLTQNDITRYNTIIGGKVKADGKKVQGLNEYINLFNQHNKDKKLPLLKPLYKQILSEENSASFIVPAFEKDNEVLQSIFDFWNKCIIDAKGPISGKKYNLLSKIQSLLQNLDKLKNNQLEEMYFENENLSTISNDVYGQWNLIRDALGNFYNSIDAKKNKKDYYSWKEIQDALVYYKQTNDEYKDIDQKAFLIYFKEMKVNDGEENTNNNIINLINERYKRIEPLLKEDRDNRKDLHQDKGKVAIIKEFLDSLKLLQNTIKLLYVDDSLDNMNYDFYNQLTDYYETLRPLNTLYNRVRNYMTRKPFSEEKFVLTFNSPTLLDGWDLNKEEANLGVILRKDNKYYLGIMNKGDNKIFKKYDEEPGDDYYEKMVYKLLPGPNRMLRKVFFSNKNIEYYKPNQDIQNLYNKGEFKKGESLNKESLHKLIDFYKNSISKNGDWSVFNFKFKKTTAYDDISQFYKDVENQGYKLFFKTIKTSYIDQLVNEGKLYLFQIYNKDFSENKKRKDESNPNLHTIYFKNLFSEDNLKNVVYKLNGKAEVFYRKKSIEYPEEIRRKGHHYNELKDKFDYPIIKDKRYSEDKFLFHVPITLNFLAKSDEKVNEMVKNYIAATNEKIHIIGIDRGERNLLYLSLIDSNGNIVKQQSLNIIELPKYQKQIDYHAKLNEKEKQRLAARQNWDVIENIKELKEGYLSQVIHQIARLMVDYKAILVMEDLNFGFKRGRFKVEKQVYQKFEKMLIDKLSYLVFKEKNLCEPGGSLRAYQLSAPFKSFKALGKQSGMIFYVPAQYTSKIDPTTGFYNFLNIDVSNLARSKETFSKFDKIVYNKKEDYFEFYCKMINFESANQLTKKSQNKANAELKEFQWILCSTHHDRFKVERKNNQINYCKINVNEELKKLLNSKGINYEKSNDLKSEILNIDESKFFKELGYLLKILVSLRYNNGKKGSEEQDFILSPVKNASGKFFCTLDNNNTLPLDADANGAYNIALKGLMIVQRVKAGGKLDLSISKDDWINFLIMNKKLPK

SEQ ID NO: 8 - protein, 1352 aa, Unknown
  source: /note="Description of Unknown: Cas12 sequence"
MSNQSVFKDFTNLYELSKTLRFELKPVGKTLRMLEDAKVFKTDELIQKKYEQTKPFINKLHQEFVKESLEGRSLEGLESYQDILKEWQKDKKDKIAQKNLGIKEKELYKQVTQLFNAKAKEWSEPYAHLGLKKKDIGILFEEGVFKILKEKYNNDKDAKITNKVTGEIFFEDFWKGFVGYFQKFFETRKNFYKDDGTSTAIATRIVAQNLKRFCDNIGLFEKIKDQIDSSEVEQSFGISMEKVFSLDFYNQCLLQGGIDKYNEILGGKTLENGEKFKGINELINKYRQDNKGDKSSFLKILDKQILSEKESFIDEIKNDKELEETLKNLHETAKVKTKIFGTLFEDFIGNNTKYDLAKIYISKEAFNTISHKWTGGTDLFAENLFNALKDEQILKSSAKKKDGSYVFPDFIEFLHIKTALENVPKDINFWKERYYVNKEGENKEFFLGNGEIWQQFLQIFNFEFNELFQKEIIDNQTGKKMHIGYKVYKEEISKLLEDFKVDKDSTVIIKHFADSVLWIYQMAKYFALEKKRTWRDEYDLDTFYTDPKNGYLAFYENAYEEIVQIYNKLRNYLTKKPYSTEKWKLNFQNSTLASGWDKNKEADNFTVILRKDGKYFLGLMRKGANKLFDKRYGSEFSQGLEKGKYEKMNYKYFPSPSKMIPKTSTQVHEVKKHFKNSSEPFFLEESSSLGKFIKQLKITKEVFDLNNFEYKKSYLSTLNGESPDESQRVKADSKKTGQVKLFQKEFLNLSQNELLYKKSLFAWVDFCKEYLDCFPSTGDGFLQFKKYIQDTEKYESIDQFYKDIERGGYKISFQNISEEYISCKNQNSELYLFKIHNKDWNLKDGKPKTGMKNLHTMYFESLFSSENIAQNFPMKLNGQAEIFYRPKTDINKLEMKKDSKGKNVVDHKRYEEDKIFFHLPMTLNRGKSLFNFNVQLNNFLADNPEINIIGVDRGEKHLAYYSVINQNQEILDGGTLNVVKGGNGKDIDYHKKLEDKAEKREQARKDWQDVEGIKDLKKGYISQVVRKLADLAIEHNAIIVFEDLNMRFKQIRGGIEKSVYQQLEKALIEKLSFLVRKNEKNPEEAGYLLKAYQLSAPFETFQRIGKQTGIIFYTQASYTSKIDPLTGWRPNLYLKYSNAKKAKADISKFSEIEFINNRFEFTYDLQEFRSQKDKKKEYPKKTLWTLCSSVERYRWNRKLNDNKGGYEHYSDLTSDFKKLFKKYNININEDILGQIENMDTDDRKNNARFFSGFMFFWNLICQIRNTNSDVISGESDNDFILSPVEPFFDSRKASQFGSDLPENGDDNGAFNIARKGIMILKKISQYVEENENCDKLKWGDLYISHTDWDNFI

SEQ ID NO: 9 - protein, 921 aa, Unknown
  source: /note="Description of Unknown: Cas12 sequence"
MTNYTDFIGLYPVQKTLRFELRPQGKTAEKMRESGLLEQDREKAKNYIVMKALIDDYHRRFINELLEKASFDWQPLFEALNNVKVNKDDKSKKELEKEQLHMRKELIGLFEKDERFKYLFSEKLFSELLNKEISERNDPDEMEAMRSFDRFSGYFIGFHENRRNIYSNEDKHNSLAYRVVAENFPKFADNCRKYSLIKENMQEAVVEFKKEIASVVDIDVDQMFDISYFNKVLTQKGIDDYNTMLGGVSEEGSVKIRGLNEFLNLYYQKVTDNKRIKMAPLYKQILCESKTKSFIPYMFENDEEVISSINQYYDSVKYDILQRSVYLLSNYKEYDASKIFIDQKSISSISIVLFGSWETLGGLMQIYKADQIGDPGLEKTRKKVDKWLSSSYFTLKEVFEAIGEQDPFRVYVEKLSLVLKNIEEFDKSCLLEGTHFSGDELLTQDIKGFLDLLMEVQHLMKPFNAKEDLDKDAAFYSEYNEIYEALSEIIPLYNKVRNYATKKKYSTYKIKMNFGNPTLAAGWDLNKERDNTAVILLRGNNYYLGIMNPKKKTKFEELPSGEDNDCYRKMVYKLLPGPNKMLPKVFFSKKGIGTFNPSKEILEGYETGKHKLGDSFDIDYCHSLIDFFKENIPKYGDWGTYEFKFSPTEEYSDISQFYKEVSEQGYKITFQNISRKAIDDLVNNGALFLYQIYNKDFSEHSKGKNNLHTMYWKAAFSEENLRNVVIKINGEAELFYRDKSDISKTEHSAGTILVNRTDRKDNPIPNSIYYELFKYKTGQIKSVSDEAKQYLDDLVTHEAKYPITKDRRYTEDRMFFHIPITLNFGSSGNTNINKAVIDHVLNSKDVHIIGIDRGERNLLYVSVIDRKGNIIKQRSLNVIDGIDYHEKLDQREKENISARKSWSNVEKIKDLKEGYLSYVIH

SEQ ID NO: 10 - protein, 1238 aa, Unknown
  source: /note="Description of Unknown: Cas12 sequence"
MKDFYQFTNLYALSKTLRFSLIPTPATKQMLEDAKVFEKDETIQKKYEATKPYFDRLHREFALEALQDQKLDFKNYLELYRKYKADKKASGKLLINIEKDLRKEVVKLFDKQGEKWAKQYPGLKNKNIGVLFKEAVFTVILKERYGNEKETQILDESSGQLVSIFDSWKGFIGYFKKFHETRKNFYKDDGTSTALATRIIDQNLKRFCDNILIFESTKEKVDFSEVEISFGKPLSEVFTLEFYNTCFLQNGIDFYTKILGGETLQNGEKVKGLNECINLHKQKTGEKLPFFKSLDKQILSEKDKFFIDEISNETQLLEVLKSFVASAESKTDTIKTLVDDFVKDQDKYDLNYIYFSNDGLNTITRKWTTETQVFEEALYTALKAAKVVSSSAKKNEGGYSFPDFIPFAHLKTALESIKIDGTIWRDNFNAIENFEEKSIWAQFLAIYNFELSNLFETEIKNPEIGNCPTIGYNVYKQDFEELLKSFVYDPNAKVTIKNFADNVLSIYQMAKYFAVEKKRGWNTDYELDVFYTDPQNGYLQYYENAYEEIVQVYNKLRNYLTKKPYSEEKWKLNFDSGTPIKYTTRAIIFNNTTNERYYLGLLKKGVAKPREFEPINNNIISSGEFRRMIIQQLKFQTLAGKGYVRDFGVKYSEDKDGVKHLQQLIKKQYLSKYPCLKKIADGVYNDKKAFDADIKDVLLETYNLDFQPISEEFILNKNRLGEIYLFEIHNKDWNLKDGKNKSGSKNLHTMYFESLFVDKTTFKLNNEGAEVFYRPATNEGKLGTKKDRNGKIIINHKRYATDKILFHCPIGLNKDAGKSYTFNAKINNMLANNPDINIIGVDRGEKHLAYYSVITQKGKILDRGSLNKVEGGDKQEIDYAKKLEETAKNREQARKDWQAVEGIKDLKRGYISQVVRKLADLAIEHNAIIVFEDLNMRFKQIRGGIEKSVYQQLEKALIDKLSFLVMKGEADPEKAGHLLKAYQLVAPFESFQSMGKQTGIIFYTQANYTSKIDPITGWRPNLYLKYTSAEKAKADILKFSKIEFVNNRFELTYDIKNFVLDKKVVLSNKTKWTVCSSVERFRWNRRLESNQGNYEHYENLTENLSSLFKDFGFEIEQNIIRQVEQLATKGNEQFFRSFIFYVNLIFQIRNTDAKAKDQNKEDFILSPVEPFFDSRTPEKFGENLPENGDDNGAFNIARKGIIMLNKISAYKQEVGNVDKIIWKDLFISAAEWDNFTQE

SEQ ID NO: 11 - protein, 1301 aa, Unknown
  source: /note="Description of Unknown: Cas12 sequence"
MDSYEQFTKLYPIQKTIRFELKPQGRTKEHFDNSNFLEKDRERDDNYKILKEVIDDYHREFIDECLSNIQLNWDDLKKFSEEYRRSKEKKNNRDSESEQKRMSTTSETRAINKKNLEAEQKRMRGEIVSAFKKDDRFKHLFSEKLFSILLKNQIYEKGTLEEIEAFDCFNKFSGYFKSFHENRKNMYSDEDKETAISYRIINENFPKLLDNFEKYQYVCREYPEQIREAESTLAEAGCYIKMDEIFSIDNFNNVMMQGGKESGISRYNLAIGGIVQGTGEKPKGLNEFLNLAYQNEPNGRKKIRMEPLYKQILSKEESFSYRLEAFTDDSQLLSAIRSFFDIVEKDKNGNIFDRAVNLMSSFSNYDTSKIYIRKAYLNQVSKEIFGYRGKSDSKPAKTADESLNKSGGWEKLGQMLRDYKADSIGDRNLEKTCKKVDKWLDSDEFTLSDILGAISLAGSNETFEAYVSEICVARRNIDKEKEKEKNINVEKISGDTESIQIIKALLDSVQEFFHLLSPFQLHPNTPHDWTFYAEFNDIYDKLSAITPLYNQARNHLTKKNLDTSKIKLNFNNPTLANGWDVNKEYENTAVILIRDGKYYLGIMNPKNKRKIKFDEGSGAGPFYQKMVYKLLPGPYRMLPKVFFAKKNIDYYNPSQEIREGYKAGKHKKGKEFDKGFCHKLIDFFKESIQKNENWKVFDFKFSPTESYDDISEFYQEVEKQGYRMYFVNIPSDTIDRYVEGGDMFLFQIYNKDFAKGAKGNKDMHTLYWNAVFSEENLQKGVMKLSGEAELFYRKKSDIKDPPHREGEILVNRTYIDRTHVSGVMGEQNTVKESRIPVPDEIHKNLFDYYNHGRELTKEEKEYCDKVGSFKAYYGIVKDRRYLENKMYFHVPLTLNFKAIGEKRINKMAIEKFLTDENACIIGIDRGERNLLYYSIIDRNGKIIDQKSLNVIDGFDYHEKLSQRQTEREVARQSWNSIGKIKDLKEGYLAKAVHEISKMAIKYNAIVVLEDLHFGFKKGRLKVEKQIYQKFEEMLINKLNYLVFKDVSDSSDAGGVLNAYQLTAPLESFSKLGKQSGILFYVPAAFTSVIDPTTGFVDLFNSSSITSTQKKKEFLQRFESIVYSARDGGIFAFTFDYRNFSKIATDHRNMWTVYTHGERIRYVRDEKCYKTTDPTKRIKEALSGIEYDDGSDIRDKITQSGDNNLINTVYHSFMDTIKMRNKDGRIDYIISPVKNRNGEFFRSDYKHRDFPVDADANGAYHIALKGELLMRMIGKTYDSNSDKMPKLEHKDWFEFMQTRGDQ

SEQ ID NO: 12 - protein, 1368 aa, Unknown
  source: /note="Description of Unknown: Cas12 sequence"
MKKEKEFKSFGDFTNLYEISKTLRFELKPVENTQTMLDEADVFGKDKVIKDKYTKTKPFIDKLHREFVDESLKDVSLSGLKKYSEVLENWKKNKKDKDIVKELKKEEERLRKEVVEFFDNTAKKWANEKYKELGLKKKDIGILFEESVFDLLKEKYGEEQDSFLKEEKGDFLKNEKGEKVSIFDEWKGFVGYFTKFQETRKNFYKNDGTETALATRIIDQNLKRFCDNIDDFKKIKNKIDFSEVEKNFNKTADVFSLDFYNQCLLQKGIDSYNEFIGGKTLENGKKLKGVNELVNEYRQKNKNEKVSFLKLLDKQILSEKEKLSFGIENDEQLLVVLNSFYETAEEKTKILRTLFGDFVEHNENYDLDKTYISKVAFNTISHKWTNETHKFEELLYGAMKEDKPIGLNYDKKEDSYKFPDFIALGYLKKCLNNLDCDTKFWKEKYYENNADKKDKDKGFLTGGQNAWDQFLQIFIFEFNQLFNSEAFDNKGKEIKIGYDNFRKDFEEIINQKDFKNDENLKIAIKNFADSVLWIYQMAKYFAIEKKRGWDDDFELSEFYTNPSNGYSLFYDRAYEEIVQKYNDLRNYLTKKPYKEDKWKLNFENPTLANGFDKNKESDNSTVILRKKRKYYLGLMKKGNNKIFEDRNKAEFIRNIESGAYEKMAYKYLPDVAKMIPKCSTQLNEAKNHFRNSADDLEIKKSFSNPLKITKRIFDLNNIQYDKTNVSKKISGDNKGIKIFQKEYYKISGDFDVYKSALNDWIDFCKDFLSKYDSTKDFDFSILRKTKDYKSLDEFYVDVAKITYKISFTPVSESYIDQKNKNGELYLFEIYNQDFAKGKMGAKNLHTLYFENVFSPENISKNFPIKLNGNAELFFRPKSIESKKEKRNFVREIVNKKRYSEDKIFFHCPITLNRETGSIYRFNNYVNNFLSENNINIIGVDRGEKHLAYYSVIDKNGVKIGGGSFNEINKVDYAKKLEERAGEREQSRKDWQVVEGIKDLKKGYISQVVRELADLAIKHNAIIVLEDLNMRFKQIRGGIEKSIYQQLEKALIDKLSFLVEKGEKDPNQAGHILKAYQLAAPFTSFKDMGKQTGIVFYTQASYTSKTCPNCGFRKNNNKFYFENNIGKAQDALKKLKTFEYDSENKCFGLSYCLSDFANKEEVEKNKNKKRNNAPYSDIEKKDCFELSTKDAVRYRWHDKNTERGKTFFEGESVYEEKEEKEIGQTKRGLVKEYDISKCLIGLFEKTGLDYKQNLLDKINSGKFDGTFYKNLFNYLNLLFEIRNSISGTEIDYISCPECQFHTDKSKTIKNGDDNGSYNIARKGMIILDKIKQFKKENGSLDKMGWGELFIDLEEWDKFAQKKNNNIIDK

SEQ ID NO: 13 - protein, 1285 aa, Unknown
  source: /note="Description of Unknown: Cas12 sequence"
MKSFDSFTNLYSLSKTLKFEMRPVGNTQKMLDNAGVFEKDKLIQKKYGKTKPYFDRLHREFIEEALTGVELIGLDENFRTLVDWQKDKKNNVAMKAYENSLQRLRTEIGKIFNLKAEDWVKNKYPILGLKNKNTDILFEEAVFGILKARYGEEKDTFIEVEEIDKTGKSKINQISIFDSWKGFTGYFKKFFETRKNFYKNDGTSTAIATRIIDQNLKRFIDNLSIVESVRQKVDLAETEKSFSISLSQFFSIDFYNKCLLQDGIDYYNKIIGGETLKNGEKLIGLNELINQYRQNNKDQKIPFFKLLDKQILSEKILFLDEIKNDTELIEALSQFAKTAEEKTKIVKKLFADFVENNSKYDLAQIYISQEAFNTISNKWTSETETFAKYLFEAMKSGKLAKYEKKDNSYKFPDFIALSQMKSALLSISLEGHFWKEKYYKISKFQEKTNWEQFLAIFLYEFNSLFSDKINTKDGETKQVGYYLFAKDLHNLILSEQIDIPKDSKVTIKDFADSVLTIYQMAKYFAVEKKRAWLAEYELDSFYTQPDTGYLQFYDNAYEDIVQVYNKLRNYLTKKPYSEEKWKLNFENSTLANGWDKNKESDNSAVILQKGGKYYLGLITKGHNKIFDDRFQEKFIVGIEGGKYEKIVYKFFPDQAKMFPKVCFSAKGLEFFRPSEEILRIYNNAEFKKGETYSIDSMQKLIDFYKDCLTKYEGWACYTFRHLKPTEEYQNNIGEFFRDVAEDGYRIDFQGISDQYIHEKNEKGELHLFEIHNKDWNLDKARDGKSKTTQKNLHTLYFESLFSNDNVVQNFPIKLNGQAEIFYRPKTEKDKLESKKDKKGNKVIDHKRYSENKIFFHVPLTLNRTKNDSYRFNAQINNFLANNKDINIIGVDRGEKHLVYYSVITQASDILESGSLNELNGVNYAEKLGKKAENREQARRDWQDVQGIKDLKKGYISQVVRKLADLAIKHNAIIILEDLNMRFKQVRGGIEKSIYQQLEKALIDKLSFLVDKGEKNPEQAGHLLKAYQLSAPFETFQKMGKQTGIIFYTQASYTSKSDPVTGWRPHLYLKYFSAKKAKDDIAKFTKIEFVNDRFELTYDIKDFQQAKEYPNKTVWKVCSNVERFRWDKNLNQNKGGYTHYTNITENIQELFTKYGIDITKDLLTQISTIDEKQNTSFFRDFIFYFNLICQIRNTDDSEIAKKNGKDDFILSPVEPFFDSRKDNGNKLPENGDDNGAYNIARKGIVILNKISQYSEKNENCEKMKWGDLYVSNIDWDNFVTQANARH

SEQ ID NO: 14 - protein, 1366 aa, Unknown
  source: /note="Description of Unknown: Cas12 sequence"
MNTQKKEFNPKSFKDFTNLYSLNKTLRFSLTPNKKTAEILEFNKQKEVKCFSNDRKIAGAYQEIKKYLNKLHQEFIQEAMKFFAFSEEELKGFEKEYLNLLNFTDKDNFKKKNKIRNEYEQERKILTIKIATYFSKFKSEKYQSFNLANITGKKVFSILEQKYKEDKKTLKIIHIFKYKPTKDEKKEGEAVNFSTYLTGFNENRKNFYKSEDKAGQFATRTIDNLAQFIKNKKLFEDKYQKNYSKIGILDEQIKIFNLDYFNNLFLQEGLDEYNGILGNNKGEENKSNEGINQKINIFKQKEKARLKKEKENFNKSDFPLFKELYKQIGSIRKENDVYVEIKTDKELVEELNNFPKNVENYLKDIQSFYKTFFEKLQNEEYELDKIYLPKSVGTYFSYIAFSDWNKLAFIYNKRYKNEKIKIVEGGDVNVQYRSLEVLKNRIDELKDEDNLNFNKFFIDKLKFNEAKKENNWQNFWFCIEYYINSQFIGGEKNILNKEKNEYEILPFGSLKELKEKYFEAVKKYKEKMVDTESGLTDDEEKEIKETLKNYLDRIKEIERIAKYFDLKKSFEEIKQEDLDSNFYGEYQKVVDKTNELKIYQYYSEFRNYLTQNNSVEEKIKLNFNSGLLLDGWDLNKEKVKFSIIFQENGKYYLGIINKEKDKTILDKDKHPEIFTKNSDFRKMEYKLFPSPSKMLPKISFSETAKKGDEDVGWSEEIQKIKDEFAEFQEYKKKSKDNWKDEFNRGKLNKLIDYYKQVLEKHSEGYMNTYNFELKDSSKYKNLGEFNDDIARQNYKVKFVGIDKNYIDEKVANGELFLFQIYNKDFSEDKKEGSTNNLETIYFKELFSKENLENPVFKLSGGAEMFFRNKIEKKKEKKKLDKDGKPMISKKGEKVVDKRRFSENKILFHLPIEINYGKGKMPNFNKKINEYISKNPENIKIIGIDRGEKHLLYYSIIDQNGNNIESMSLNAVDEFGNFVNPEKLEEYEIDNNGKKERRWKYIVNDKEIKVTNYQRKLDELEKERQKSRQSWQNINKIKNLKKGYISFVVKKIVDLAIENNAIIILEDLNFGFKSFRQKIEKNVYQQFEKALIDKLGFVVDKQKQNQRFAPQLSAPFESFQKIGKQTGIVYYVLANNTSKVCPSCQWIKNFYLKYEKKNTIFNLQKNQKLKVFFEQEKNRFRFEYQMSKEYISVYSDVDRQRYDKTKNQNKGGYLEYKNSNQKEIIDKDGVIQKQSITLQLKELFKENHIDLEKEILKQLDNKKEKNSGYTGVYNKFIYLFNLILQIRNAISFREKDYIQCPSCHFDTRKENYLKINDGDGNGAYNIALRGLYLLKGKNGIINNLEKIKLIFSNNDYFQWAKKLKNKK

SEQ ID NO: 15 - protein, 1285 aa, Unknown
  source: /note="Description of Unknown: Cas12 sequence"
MEEKMLKSYDYFTKLYSLQKTLRFELKPIGKTLEHIKNSGIIESDETLEEQYAIVKNIIDKLHRKHIDEALSLVDFTKHLDTLKTFQELYLKRGKTDKEKEELEKLSADLRKLIVSYLKGNVKEKTQHNLNPIKERFEILFGKELFTNEEFFLLAENEKEKKAIQAFKGFTTYFKGFQENRKNMYSEEGNSTSIAYRIINENLPLFIENIARFQKVMSTIEKTTIKKLEQNLKTELKKHNLPGIFTIEYFNNVLTQEGISRYNTIIGGKTTHEGVKIQGLNEIINLYNQQSKDVKLPILKPLHKQILSEEYSTSFKIKAFENDNEVLKAIDTFWNEHIEKSIHPVTGNKFNILSKIENLCDQLQKYKDKDLEKLFIERKNLSTVSHQVYGQWNIIRDALRMHLEMNNKNIKEKDIDKYLDNDAFSWKEIKDSIKIYKEHVEDAKELNENGIIKYFSAMSINEEDDEKEYSISLIKNINEKYNNVKSILQEDRTGKSDLHQDKEKVGIIKEFLDSLKQLQWFLRLLYVTVPLDEKDYEFYNELEVYYEALLPLNSLYNKVRNYMTRKPYSVEKFKLNFNSPTLLDGWDKNKETANLSIILRKNGKYYLGIMNKENNTIFEYYPGTKSNDYYEKMIYKLLPGPNKMLPKVFFSKKGLEYYNPPKEILNIYEKGEFKKDKSGNFKKESLHTLIDFYKEAIAKNEDWEVFNFKFKNTKEYEDISQFYRDVEEQGYLITFEKVDANYVDKLVKEGKLYLFQIYNKDFSENKKSKGNPNLHTIYWKGLYDSENLKNVVYKLNGEAEVFYRKKSIDYPEEIYNHGHHKEELLGKFNYPIIKDRRYTQDKFLFHVPITMNFISKEEKRVNQLACEYLSATKEDVHIIGIDRGERHLLYLSLIDKEGNIKKQLSLNTIKNENYDKEIDYRVKLDEKEKKRDEARKNWDVIENIKELKEGYMSQVIHIIAKMMVEEKAILIMEDLNIGFKRGRFKVEKQVYQKFEKMLIDKLNYLVFKNKNPLEPGGSLNAYQLTSKFDSFKKLGKQSGFIFYVPSAYTSKIDPTTGFYNFIQVDVPNLEKGKEFFSKFEKIIYNTKEDYFEFHCKYGKFVSEPKNKDNDRKTKESLTYYNAIKDTVWVVCSTNHERYKIVRNKAGYYESHPVDVTKNLKDIFSQANINYNEGKDIKPIIIESNNAKLLKSIAEQLKLILAMRYNNGKHGDDEKDYILSPVKNKQGKFFCTLDGNQTLPINADANGAYNIALKGLLLIEKIKKQQGKIKDLYISNLEWFMFMMSR

SEQ ID NO: 16 - protein, 1238 aa, Unknown
  source: /note="Description of Unknown: Cas12 sequence"
MNNYDEFTKLYPIQKTIRFELKPQGRTMEHLETFNFFEEDRDRAEKYKILKEAIDEYHKKFIDEHLTNMSLDWNSLKQISEKYYKSREEKDKKVFLSEQKRMRQEIVSEFKKDDRFKDLFSKKLFSELLKEEIYKKGNHQEIDALKSFDKFSGYFIGLHENRKNMYSDGDEITAISNRIVNENFPKFLDNLQKYQEARKKYPEWIIKAESALVAHNIKMDEVFSLEYFNKVLNQEGIQRYNLALGGYVTKSGEKMMGLNDALNLAHQSEKSSKGRIHMTPLFKQILSEKESFSYIPDVFTEDSQLLPSIGGFFAQIENDKDGNIFDRALELISSYAEYDTERIYIRQADINRVSNVIFGEWGTLGGLMREYKADSINDINLERTCKKVDKWLDSKEFALSDVLEAIKRTGNNDAFNEYISKMRTAREKIDAARKEMKFISEKISGDEESIHIIKTLLDSVQQFLHFFNLFKARQDIPLDGAFYAEFDEVHSKLFAIVPLYNKVRNYLTKNNLNTKKIKLNFKNPTLANGWDQNKVYDYASLIFLRDGNYYLGIINPKRKKNIKFEQGSGNGPFYRKMVYKQIPGPNKNLPRVFLTSTKGKKEYKPSKEIIEGYEADKHIRGDKFDLDFCHKLIDFFKESIEKHKDWSKFNFYFSPTESYGDISEFYLDVEKQGYRMHFENISAETIDEYVEKGDLFLFQIYNKDFVKAATGKKDMHTIYWNAAFSPENLQDVVVKLNGEAELFYRDKSDIKEIVHREGEILVNRTYNGRTPVPDKIHKKLTDYHNGRTKDLGEAKEYLDKVRYFKAHYDITKDRRYLNDKIYFHVPLTLNFKANGKKNLNKMVIEKFLSDEKAHIIGIDRGERNLLYYSIIDRSGKIIDQQSLNVIDGFDYREKLNQREIEMKDARQSWNAIGKIKDLKEGYLSKAVHEITKMAIQYNAIVVMEELNYGFKRGRFKVEKQIYQKFENMLIDKMNYLVFKDAPDESPGGVLNAYQLTNPLESFAKLGKQTGILFYVPAAYTSKIDPTTGFVNLFNTSSKTNAQERKEFLQKFESISYSAKDGGIFAFAFDYRKFGTSKTDHKNVWTAYTNGERMRYIKEKKRNELFDPSKEIKEALTSSGIKYDGGQNILPDILRSNNNGLIYTMYSSFIAAIQMRVYDGKEDYIISPIKNSKGEFFRTDPKRRELPIDADANGAYNIALRGELTMRAIAEKFDPDSEKMAKLELKHKDWFEFMQTRGD

SEQ ID NO: 17 - protein, 1347 aa, Unknown
  source: /note="Description of Unknown: Cas12 sequence"
MASSHFISLDNSFSKFTNLYSLSKTLRFELVPTENTTVMLENNNVFKKDQIIQVKYEKTKPFIDRLHREFIKEALSNYAVSGLQEYFEILRAGGKKANLDSAKKQLRKHVVDQFNATASLWVSRHKDVGFKGEGIELLFKEAVFKLLKEKYGTDMNALIEDNHGKQISIFDSWKGFTGYFDKFQQTRRNLYKDDGKEGRVATRIIDQNLTRFCDNIFVYEKIKDKVSFIDVEKSFGKTCSEVFIPDYYNTCLLQDGIDSYNEFIGGKPLENGEKVQGLNELINLYRQTTGDKVPYFKKLEKQILGEKDEVFIDEITDEDFVPRVLAFYRTVDAKYKLFLKLLDDFVTNQDVYELSQIYISKKGLQEKLYRWLTPSAREVYDEELFEVLKKAKKVNNKDKQKVSGYVPDFVEVLYIKQALENIDAKLIWSDRYYSDGENEGIIDKGFSSWKQFLVILNHEYRQLLSFEDHVIIDKELDFDKEVKQLTDTVEIVSQDKNARTVTYRGGYDVYKAKLAELGQSFEKDTCTKKVIKNFADSVLSMYHFAMMFAVWDDTYPLDVFYTNNEFGYLLYYEDAYKNIVQEYNKLRNYLTKKPYSTEKWKLNFENPTLAAGFDKNKESDNSTVILRQGDKYFLGVMKKGFNKIFDNSQISQTGNSPEAYFEKMVYKYTKDVVTGIPKSSTQVKEVQEHFRNSDEDFFLEECSSVGNFIVPLKITKEIFDLNNKVYAKEDISQAMYRWALNTDEEKNYVKSFQKSYLSLGGSPELYCKSVTLWIGFCLNFLKSYPSAAYFDYSQLRQASDYESVDECYQELNNAGYTILFQNVSEKYVRVKNKNGELYLFQIKNKDWNEGSTGKKNLHTLYFESLFSKENAKQGFPFKLSGNAELFFRPGSIEQTYERRNFPREIPLKRRYSKDGIFFHIPVQVNRTKVGSPNQFNKEVNDFLAGNPNINIIGVDRGEKHLVYYSVISQNGEKIDGGSFNEINGQDYHDKLEKRAKEREQQRRDWETVEGIKDLKKGYISQVVKKLADLAIEHNAIIVMEDLNMRFKQIRGGIEKSVYQQLEKALIDKLSFLVNKGEVDPQKAGHLLKAYQLTAPIDAFKDMGKQTGIMFYTQAAYTSKIDPVTGWRPHLYLKYSSVEKAKDDISRFTKIAYKNDRFEFTYNITDFRTQKEWPLKTEWTVCSCVERFRWNKKLANGKGDYEHYPNVTDDFKKLFDSVGINYLQENIKSQVVNLDENTNVEFFREFIKLFALVCQIRNTNSEEAGNLNDFILSPVEPFFDSRSAEDFGKGLPSNGDENGAYNIARKGMIILNTLSTFKNDHGSCEGLSWGDLYISDTQWDDFAQSFHG

SEQ ID NO: 18 - protein, 1227 aa, Unknown
  source: /note="Description of Unknown: Cas12 sequence"
MDAKEFTGQYPLSKTLRFELRPIGRTWDNLEASGYLAEDRHRAECYPRAKELLDDNHRAFLNRVLPQIDMDWHPIAEAFCKVHKNPGNKELAQDYNLQLSKRRKEISAYLQDADGYKGLFAKPALDEAMKIAKENGNESDIEVLEAFNGFSVYFTGYHESRENIYSDEDMVSVAYRITEDNFPRFVSNALIFDKLNESHPDIISEVSGNLGVDDIGKYFDVSNYNNFLSQAGIDDYNHIIGGHTTEDGLIQAFNVVLNLRHQKDPGFEKIQFKQLYKQILSVRTSKSYIPKQFDNSKEMVDCICDYVSKIEKSETVERALKLVRNISSFDLRGIFVNKKNLRILSNKLIGDWDAIETALMHSSSSENDKKSVYDSAEAFTLDDIFSSVKKFSDASAEDIGNRAEDICRVISETAPFINDLRAVDLDSLNDDGYEAAVSKIRESLEPYMDLFHELEIFSVGDEFPKCAAFYSELEEVSEQLIEIIPLFNKARSFCTRKRYSTDKIKVNLKFPTLADGWDLNKERDNKAAILRKDGKYYLAILDMKKDLSSIRTSDEDESSFEKMEYKLLPSPVKMLPKIFVKSKAAKEKYGLTDRMLECYDKGMHKSGSAFDLGFCHELIDYYKRCIAEYPGWDVFDFKFRETSDYGSMKEFNEDVAGAGYYMSLRKIPCSEVYRLLDEKSIYLFQIYNKDYSENAHGNKNMHTMYWEGLFSPQNLESPVFKLSGGAELFFRKSSIPNDAKTVHPKGSVLVPRNDVNGRRIPDSIYRELTRYFNRGDCRISDEAKSYLDKVKTKKADHDIVKDRRFTVDKMMFHVPIAMNFKAISKPNLNKKVIDGIIDDQDLKIIGIDRGERNLIYVTMVDRKGNILYQDSLNILNGYDYRKALDVREYDNKEARRNWTKVEGIRKMKEGYLSLAVSKLADMIIENNAIIVMEDLNHGFKAGRSKIEKQVYQKFESMLINKLGYMVLKDKSIDQSGGALHGYQLANHVTTLASVGKQCGVIFYIPAAFTSKIDPTTGFADLFALSNVKNVASMREFFSKMKSVIYDKAEGKFAFTFDYLDYNVKSECGRTLWTVYTVGERFTYSRVNREYVRKVPTDIIYDALQKAGISVEGDLRDRIAESDGDTLKSIFYAFKYALDMRVENREEDYIQSPVKNASGEFFCSKNAGKSLPQDSDANGAYNIALKGILQLRMLSEQYDPNAESIRLPLITNKAWLTFMQSGMKTWKN

SEQ ID NO: 19 - protein, 1331 aa, Unknown
  source: /note="Description of Unknown: Cas12 sequence"
MVNKQNERGDFDDLTNLYEISKTLRFELVPVGETDRMLKEENVFKVDENIKRKYQQTKLFFDRIHREFAKEALSVEGILSELEEYLAIFIEWRKDKKIHEKTLNQKEKELRKQVVSAFNAMANKWIERYGDVNLKKKNVEFLFEEGIFRVLKERYGEEDGSTITASDTGEVFSIFDSWKGFTGYFAKFFETRKNFYKDDGTATAIATRIVDENLRRFCDNLIVAQRLTENIDFSEVENNFQIKIKEVLFMEFYNKCLLQDDIDFYNKVIGGETLKTGEKLKGINELVNLHRHKTGEKLPFLKTLDKQILGRKEQFLDEIESEEELLEKLKDFQNVATKKIKVIKSLFGDFVENNENYDLEKIYISKKAFNTISRKWTGETEQFEKLLFESMKSDKPAGLKYDKKENNYKFPDFIAVSYIKDALENFSGEQKFWKDRYYIELELDNQVVWKQFLDIFYWEFSSLFKRSFVNKETGEISEVGCDIFEKKFINLIDDFEYNQKSKILIKDFADSVLSVYQMANYFSLEKKRKWSTEFETDSKFYDDSEIGFRNCFYEDVFEGIVQVYNKLRNYLTKKPFSEEKWKLNFENPTLAAGWDKNKEKDNSTVILRKDEKYFLAIMKKGNNVIFDDRNKALFSQNLEHGKYEKVVYKFAKDVTLGIPKSTTQTKSVIAHFKNSDEDYQITNGSAVGDFLEPLVVTKRIFELNNKIYSKNNLGKVLYRSEVSKDKQKEYIKLFQKKYLVLGGNKNLYRDAVKEWIDFCKSFIKVYPSYKYFDFSLLKEAVEYNSVDEFYKELNSYGYAISFQDISCDYIEEKNKNGELYLFQIKNKDWNKGSTGMKNLHTLYFESLFSEENIKNNFVTKLNGGAEIFYRPKTSKEKLGRKKIVRNGQEVFVVNHKRYSEDKIFFHCSIALNRGKGKLLKFNARINDLLANNPDINVIGVDRGEKHLAYYSIIDQKCKILDSGTLNEVGAKVDYHEKLSNRAKKREDGRRDWGWGQIEDIKNLKKGYVSQVVHKLAELIIKYNAILVFEDLNMRFKQIRGGIEKSIYQQLEKALIDKLNFLVKKGEKDSKSAGHLLKAYQLAAPFETFDKMGKQTGVIFYTQASYTSKIDPITGWRPNLYLKHSNANDSQKKIAKFSRIEFINDRFEFEYDLKKFIEMKEVPENTKWTLCSCVQRYRWNRKLNANKGGYDSYNDLTKNFKALFESVGIDIKKNIKEQIVKMEIKGNEKFFKSFIFYWQLLCQIRNTDELKKGDDNDFILSPVEPFFDSRKKNGDDLPKNGDDNGAYNIARKGVIVLNKISEFSKQNGNCEKCGWKELYVSAKDWDDFVQAK

SEQ ID NO: 20 - protein, 1275 aa, Unknown
  source: /note="Description of Unknown: Cas12 sequence"
MQNKQSFADFTNLYSLSKTLRFELKPIGQTQAMLDENKIFEVDENRKKAYDKTKPYFDRLHREFINESLSNAQLKGISEYFETFKQFRSNQNNKDLKELINKQQKFLRHQIVTLFDENGKHWATTKYAHLKIKKKNLDILFDEQVFYILKERYGSEKETQLVDKETGAVTSIFDNWKGFTGYFTKFFETRKNFYKSDGTSTALATRIIDQNLNRFFDNLETFHKIKDKIDVKEVEIFFKLKADNVFSIDFYNQCLLQNGIDKYNDFLGGQTLENGEKQKGINEIINKYRQDNKDQKLPFLKKLDKQILSEKDRFINEIESKEEFFQVLTEFYQSATVKVTIIKTLLNDFVHNTDKYKLEKIYLTKEAFNTIANKWTDETQIFEDNLDLVLKNKKITAKQDFIPLAYIKEALEVIEKDRKFFKDRYYNDPQIGFFPDQSYWEQFLAILNFEFMTHFQRVAKDKITGKKIELGYFVFEKRIKELLDSDPSLNSQSKIIIKEFADEVLHIFQMAKYFALEKKREWKGDYYQLDDQFYNHIDYGFKDQFYENAYEKIVQPYNKIRNYLTKKPYSDVKWKLNFGNPTLANGWDKNKEADNTAVILKKDGNYYLGVMKKGKNKIFSDQNKEKYKAYNSAYYEKLVYKLFPDPSKMFPKVCFSKKGLNFFQPSEEILRIYKNNEFKKGNTFSISSMQKLIAFYIDCLGLYEGWKHYEFKNIKDVRQYKENIGEFYADVAESGYKLWFEKISEEYITQKNQLGELFLFQIYNKDFAKKTTGRKNLHTIYFEELFSQTNIDNNFPFKLNGQAELFYRPKSLEKIEEKRNFKRSIVNKKRYTQNKIFFHVPITLNRTSENIGRFNVRVNNFLANNSNVNIVGVDRGEKNLAYYSIIKQNGEVLKSGSLNIINGVDYHALLTDRAQRREQERRNWQDVESIKDLKRGYISQVVHELVSLAIKYNAIIVMEDLNMRFKQIRGGIEKSTYQQLEKALIEKLNFLVNKEETDSNQAGNLLNAYQLTAPFKTFKDMGKQTGIIFYTQASYTSKIDPLTGWRPNIYLRYSNAKQAKADILMFTNIYFSEKKDRFEFTYDLEKIDDKRKDLPIKTEWTVCSNVERFSWEKSLNNNKGGYVHYPIQDSNGEESITSKLKKLFMDFGIDLTDIKTQIESLDTNKKDNANFFRKFIFYFQLICQIRNTQVNKSDDGNDFIFSPVEPFFDSRFADKFRKNLPKNGDENGAYNIARKGLIILHKISDYFVKEGSTDKISWKDLSISQTEWDNFTTDK

SEQ ID NO: 21 - protein, 1313 aa, Unknown
  source: /note="Description of Unknown: Cas12 sequence"
MDKQKNKLQNFTNLYELSKTLRFELKPVGETQHLLEENKVFGIDGNIKKKYEATKPFFDRLHRKFVKEALVNIALGGLDNYLEVYKKFTNDRKDKENQKELEKQEKLLRKQIKIFFDSQANQWKEKYNKINFKKSGLNILFEESIFQLLKEIYGKEDDAFLKNDDNEFIFDKDGNKISIFDSWKGFTGYFKKFFETRKNFYKDDGTSTAIATRIIDQNLRRFCDNIFIYNKIKNKLDFSSLEKEQDVVLEEIFTTAYYMDCILQDDIDLYNGVLGGETLDDGTKIKGLNEIINKYRQDNKGDKIPFFKKLDKQILSEKDRKFLDEIESEEELAELLKIFINNTEAKVKVFDELVNQLCVNDSDFELDKIYISKEAFNTISHKWTNQTHEFERVLFEEMKPDKITGLDYKKAEDKYKFPDFIALKYIIKSLNTLDKDSEFWKSHYYKTEENQNAILSLEEKVGEQFLQIYKYELQRLHSRNVNVENKDGKMKEKEIGLDYSLTTVKELLKNFKLTDKSKIIIKDFADNVLQYYQLAKYFSVEKNREWNYTKLELADFYINPDFGYEIFYGNAYEEIIQIYNKLRNYLTKKPFSEEKWKLNFENPTLAGGWDKNKERGNATVILRKNEKYYLGIMAKGYNDIFTDKNKDKFDGEGYEKMVYKLFPGPNKMMPKVCFSKKGLDFFEPSEKIIDIYKDGKFKQGDTFSIDSMQQLIDFYKRALREYNGWKMYDFSKLKDTNDYTTNIGEFYNDVACAGYKVWFDNISEEYIQEKNENGELYLFEIHNKDWNLKDEKKKTGTKNLHTLYFESLFSDENALRDFVMKLSGEAELFFRPKTNADKLGYRKDKKGNKVVKNKRYSEDKMFLHLSINLNRGKGQAFWFNRNINNFLANNSDINVIGIDRGEKHLAYYSVISQQGEILDNGSLNEIAGVDYYAKLSKRAKEREGQRKDWQAVSDIKNLKKGYISQVVRKLADLAIEHNAIIVLEDLNMRFKQIRGGIEKSIYQQLEKALIEKLNFLVNKKEIDSDKAGNLLRAYQLTAPFETFQKMGKQTGIIFYTQASYTSKIDPLTGWRPNLYLKKGNAKINKEQIEKFSKIEFTNNRFEITYDLKNFGDKKKKYPQKTKWTLCSSVERWRWDRKLNNNKGGYIHYEDLTTEFKSLFEKFEIDIEGDILEQIKTIDENDRNNARLFSGFIYLWGLLSQIRNTDGELDEKIKKLEREDKNEEISEKEKFDVDFILSPVEPFFDSRTPEKFGENLPKNGDDNGAYNIARKGIITLERIKKFYELSDKEREKLKYPDLFITNAEWDDFATKRDS

SEQ ID NO: 22 - protein, 1155 aa, Unknown
  source: /note="Description of Unknown: Cas13 sequence"
MDNNTTLEKTELGLGITYNHDKVEDKHYFGGFFNLAQNNIDLVAQEFKKRLLVQGKDSINIFSNYFSDQCSITNLERGIKVLSEYFPVIFYFDLDENNKSKSIRQHIILLLDTINNLRNYYTHYYHKKVIIDDALYPLLDTILLKVVLEIKKKKLKEDKTKQLLKKGLEKEMAILFNLMKKEQKEKKIKGWNIDKNIKGAVLNRAFSHLLYNDGISDYRKSKSNTEDENLKDTLSESGILFLLSFFLNKKEQEQLKANIKGYKGKIASIPDEEITLKNNSLRNMATHWTYSHLTYKGLKHRIKTDHEKETLLVNMVDYLSKVPNEIYQNLSEQNKSLFLEDINEYMRDNEENNDSSEASRVIHPVIRKRYENKFAYFAIRFLDEFAEFPTLRFMVNVGNYIHDNRKKDIGGTSLITNRTIKQQINVFGNLTEIHKKKNDYFEKEENKEKILEWELFPNPSYHFQKENIPIFIDLEKSKETNELAKEYAKEKKKIFGSSRKKQQNTAKKNREAIINLVFDKYKTSDRKTVTFEQPTALLSFNELNAFLYAFLVENKTGKELEKIIIEKIANQYQILKNCSSTVDKTNDSIPKSIKKIAHPTTDSFYSEGKKIDIEKLERDIKIEIEKTNEKLETIKENETSAKNYKRNERDIQKRKLYRKYVFFTNEIGIEATWITNDILRFLDNKENWKGYQHSELQKFISQYDNYKKEALGLLESEWNLESEAFFGQKLKRIFQSNFTFETFYKKYLDNRKDTLETYLSAIENLKTMTDVPPKILKKSWAELFRFFDKKIYLLSTIETKINELITKPINLSRGVFDEKPTFINGKSPNKENDQHLFANWFIHAKEQTIFQDFYNLALETPKEINNLKKQNYKLERSINNLKIEDIYIKQMVDFLYQKLFEQSFKGSLQDLYTSKEKREVEKSKAKNEQTPDESFIWKKQVEINALNGRIIAKTKIKDIGKFKNLLTDNKITHLISYDNRIWNFSLDNDGDTTKKLYSLNTELESYERIRREKLLKQIQEFEQFLLKQETEYSAERKHPEKFEKDGNPNFKKYIIEGMLNKITPVNEIEELEILKSKEDVFKIDFNEIVKLNNESIKKGYLLIMIRNKFAHNQLIDKNLFTFSLQLYSKNENENFSEYLDKVCQKIIQEFIEKLK

SEQ ID NO: 23 - protein, 1134 aa, Unknown
  source: /note="Description of Unknown: Cas13 sequence"
MNETDYLAKRLEYNYASIEDKHYFGGYFNLAQNNINDLSKAFKEKFGMKPKSCILDFFTQDKAIAEYQLGVEFLQKNLPVIRYLYLPTSHKRFENVPKNQLISEQRNYFKNSLKVLKNLIRDYRNFYTHHFHKPIPVFPETYKLLDDLFLAVANDVKKHRMKTDASKQLLKKGLIEELAQLEKLKLEDLKKLKREGKKVNLNDKEAITNAILNDSFSHLLPKENTISKYYSAVPTEDIDTENGVTISESGIIFLLGLFLTKKQSEDLRSRVKGFKAKLIVNPENPINKKNNSLKYMATHWVFGYLGFKGLKNRFTTTFTKDTLLAQIVDELSKVPDELYQVLPEELKNEFLEDMNEYLKEENSESLDKATVIHPVIRKRYENKFAYFALRFLDEFVDFPTLRFQLHLGNYVHDKREKPIEGTKYVTERIVKEKIKAFAKLSEAAQLKQKYFEEKENHQSIGLQLYPNPSYNFVGNNIPIHLNLNEHFFPKEVKIVAGRLKKRNSSYKSDHPEEYKVRTDNKIKPDAILQDLGKPEKLAPVAMLSLNELPALLHLVLTKKTPEEIEIIIAQKIAERYNVLTNYKAGDDISKGQITKNLLKAKQKKEVNLDKLQLAIEKEIAVTNDKLQTIALHIKERNDPKQKRKYVFTNKEIGLQVTWLANDLKRFMPKGSRQNWRGQHHSQLQKSLAFYDIQPKEPLSLLEEVWDFKNEAYLWNNGIRRSFDKRDFISFYTSYLNNRKETFQRFKDQLNGIRSNKKILDKFIKQQHLWNLFHKRLYVIDTIEEQVEKLLVKPMQFPKGVFDHKPTYIKGKSIQENPECFADWYVAWNQHTDYQKFYSWDRDYKSAYLSGEQEKTEKRFIRVQGSKINKVKQQDVLLAKMASIIFNELYLPEDAEHLDLNLSDIYKTQTERKAEIEAALIQSHKTTGDNSANIIKSTSAWTLTVPYCSKNIYEPQVKLKELGKFKKFIASQKVQTLFEYKPQKIWNKTELEEVLELKANSYEVIRRDYLLKSIQEFEKYMIKKLPTLIDTNEHPNFNKYLTTFLKSLELVSEEDAKWLISKKDFDTTPIDELKKQSKIMEKAFLLVMIRNKFSHNQLPRKIYYDEIYKNVPNAVSINFNELFLEYTNQTILEFK

SEQ ID NO: 24 - protein, 1145 aa, Unknown
  source: /note="Description of Unknown: Cas13 sequence"
MESIIGLGLSFNPYKTADKHYFGSFLNLVENNLNAVFAEFKERISYKAKDENISSLIEKHFIDNMSIVDYEKKISILNGYLPIIDFLDDELENNLNTRVKNFKKNFIILAEAIEKLRDYYTHFYHDPITFEDNKEPLLELLDEVLLKTILDVKKKYLKTDKTKEILKDSLREEMDLLVIRKTDELREKKKTNPKIQHTDSSQIKNSIFNDAFQGLLYEDKGNNKKTQVSHRAKTRLNPKDIHKQEERDFEIPLSTSGLVFLMSLFLSKKEIEDFKSNIKGFKGKVVKDENHNSLKYMATHRVYSILAFKGLKYRIKTDTFSKETLMMQMIDELSKVPDCVYQNLSETKQKDFIEDWNEYFKDNEENTENLENSRVVHPVIRKRYEDKFNYFAIRFLDEFANFKTLKFQVFMGYYIHDQRTKTIGTTNITTERTVKEKINVFGKLSKMDNLKKHFFSQLSDDENTDWEFFPNPSYNFLTQADNSPANNIPIYLELKNQQIIKEKDAIKAEVNQTQNRNPNKPSKRDLLNKILKTYEDFHQGDPTAILSLNEIPALLHLFLVKPNNKTGQQIENIIRIKIEKQFKAINHPSKNNKGIPKSLFADTNVRVNAIKLKKDLEAELDMLNKKHIAFKENQKASSNYDKLLKEHQFTPKNKRPELRKYVFYKSEKGEEATWLANDIKRFMPKDFKTKWKGCQHSELQRKLAFYDRHTKQDIKELLSGCEFDHSLLDINAYFQKDNFEDFFSKYLENRIETLEGVLKKLHDFKNEPTPLKGVFKNCFKFLKRQNYVTESPEIIKKRILAKPTFLPRGVFDERPTMKKGKNPLKDKNEFAEWFVEYLENKDYQKFYNAEEYRMRDADFKKNAVIKKQKLKDFYTLQMVNYLLKEVFGKDEMNLQLSELFQTRQERLKLQGIAKKQMNKETGDSSENTRNQTYIWNKDVPVSFFNGKVTIDKVKLKNIGKYKRYERDERVKTFIGYEVDEKWMMYLPHNWKDRYSVKPINVIDLQIQEYEEIRSHELLKEIQNLEQYIYDHTTDKNILLQDGNPNFKMYVLNGLLIGIKQVNIPDFIVLKQNTNFDKIDFTGIASCSELEKKTIILIAIRNKFAHNQLPNKMIYDLANEFLKIEKNETYANYYLKVLKKMISDLA

SEQ ID NO: 25 - protein, 1147 aa, Unknown
  source: /note="Description of Unknown: Cas13 sequence"
MEDKTTGAGISYDHTLMEDKHFFGGFLNLAQNNIDALLKAFKERFNVRYQSKQFAEVCFSDKLPDQDYLDRTLFLETHLPFIKYIGGKEANNRGTFRKNITLFFESIEQLRNFYTHYYHKPILFPEELYENLDRIFVEVSKEVKTHKVKNDQTRHLLTKNLANELDIRYKKNVEKLKELKAQGKKVNIHDKEAIKNSVLNNAFNHLIYKKEEDVFATEAYKSKYNLEDPSKNGISLSQSGLLFLLSMFLNKKDIEALKSRVKGFKAKIIRDGEENISGLKFMATHWVFSSLSFKNVKHKLSTDFHKETLLIQIVDELSKVPDEVYKTFDKQTQEEFIEDINEYMKVGNKDLSLEESTVIHPVIRKRYDNKFNYFALRFLDEFAGFPTLRFQVHIGNYIHDRRIKNIDGTAFQTERSVKERIKVFGKLSQMSNLKAEYVSGLMDEPVDTGWEIFPNPSYNIIENNIPIYIEMGDHFNDEVLQSKMARKKQKPEELKDRNSAKASKESMIQTLQNDKGLMDVITVSPTAQLSLNELPAILYELLVKKTPAKTIEKKLVGKLNQRLKEIKNYNPEKPLPASQISKRLRLNREEGSINTKKIIALLQKELNYTQEKLDLLEKNRKEYGKKVDGKILRKYVFGLKEIGNLATDMAMDIKRFMPANVRKEWKGYQHSQLQQSLAFYDKRPEEAFNILQEVWDINREKSLWDTWILNAFQTSGNFERFFELYHEGRKKYIQQQLENIDRYTDNKKFLQKFINQQFPTNFLEKRLYTLESLEIEKLKILSKPFILPRGTFDEKPTFIMGEKVTENPELFADWYTYGYQQHEFQKFYSWPRDYKDLLQNEQKRDPDFAENKKGLSDLKQLELLQLKQDIIIKKIKTQDLYLKLIMDALFIEVFGQEADISLNDLYLTQEERLEKEKLALKQHQRVEGDDSPNVIKDNFIWSKTMPYKHDKIYEPQVRLKDFGKFKHFLLDDKVAKILSYDLQETWNKNELEIQINTGQDSYEVIRREELLKEIQLLEKQILETFSHTLDEHPKEFEDEKGNPNFKMYMANGVIRKGSSTTAKDEADWLEHEKDFDNLSLEIFNSKSEITQLTFLIVLIRNKFGHNQLPIKQFYEIIQNEYSITGETISRLYLNFIIYAKARLKDLM

SEQ ID NO: 26 - protein, 1133 aa, Unknown
  source: /note="Description of Unknown: Cas13 sequence"
MEEKLGKGVEYNPFKKEDKYYFGGYFNLAENNINEVFKEVKKRLGETNSSSNIELLNNVFRKEMSLVDYEKWVNAFADYFPIVNYLDRETIKKGEKVVEVPREKRIECFRDMFKGLINTISQLRHYYTHYHHEPIEIDDKILSFLDEVLFNTIITTKNKYLKTDKTKELIKDSLQEELDILCKLKVKYLESKRKRFDRKDKGAIENAVYNDVFRRFIYKDEKGNESLKDIIRTKQIKVHQNSSYLELPISSSGIIFLLSLFLNKKEVESLKSNIRGYKGKSKSEETTPEKNGLLFMTTHRIYSVLAYKGLKKRIKTSVKGDKETLLMQMIDEVSKVPHCIYQNLDQTLQATFIEDWNEYFKDNEENEENLENSRVLHPVIRKRYEDKFNYFAIRFLDEYAEFPSLRFQVNLGNYVHHKATKKFGNSEVTTERVIKDKITVFGRLSEVNKAKADFFKNETELDPAWELFPNPSYEFPKEKGNNDKDAGKIGIQVKLLNKDIEAVLNESKNTLNNKTRKSDKISKKEIINKIVQINDDTKYNNKNIIYQGNAIAYLSLNDIHSLLYELLVIGTKGDKLERKVVEKIQQQVTEIRNKDTSAKILSKYKDSEESNTIDKKKLVIDLKYEYDKLQDLLKEHKNREEDYIQTKKKKKDSPKRKYILYHNEKGQVAVWLSNDIKRFMPQNFKEKWKGYQHSEFQKSLAYYETNKEMLKIILQDLDLEQFPFDIKSCFYKNTLEDFYNRYLSLRISYLENVIDRVECFSNEPKAFKSVLKECFVFLKKQNYTNHSLDEQVKKILANPIFIERGFLDTKPTMIQGVKFSENKGCFADWFVHYKEYEHYQKFYDTNLYPVESIEDKERQKLEATIKKQQKNDVFTLLMIKKIFNDLFNQDFEANLYEMYQSKEEREKNQLVAKETQNRNLNFIWNKPIAIDLFDGKVKIDEVKLKDVGSFRKYENDKRVQTFITYIPEIQWIPYLPNTWEGINLPVNVIERQIDRYEKVRSEELLKEVQAIEKYIYEQVNDKTELLQNGNQNFKNYLVNGLLKQIQGIDVSNFKFINQQKFETINVKDLDNEASALEQKVYVLINIRNQFSHNQFPKSAFYQFCQKILSIEEDELFADYYLRLFKLLRNELLD

SEQ ID NO: 27 - protein, 1156 aa, Unknown
  source: /note="Description of Unknown: Cas13 sequence"
MNTRVTGMGVSYDHTKKEDKHFFGGFLNLAQDNITAVIKAFCIKFDKNPMSSVQFAESCFTDKDSDTDFQNKVRYVRTHLPVIGYLNYGGDRNTFRQKLSTLLKAVDSLRNFYTHYYHSPLALSTELFELLDTVFASVAVEVKQHKMKDDKTRQLLSKSLAEELDIRYKQQLERLKELKEQGKNIDLRDEAGIRNGVLNAAFNHLIYKEGEIAKPTLSYSSFYYGADSAENGITISQSGLLFLLSMFLGKKEIEDLKSRIRGFKAKIVRDGEENISGLKFMATHWIFSYLSFKGMKQRLSTDFHEETLLIQIIDELSKVPDEVYHDFDTATREKFVEDINEYIREGNEDFSLGDSTIIHPVIRKRYENKFNYFAVRFLDEFIKFPSLRFQVHLGNFVHDRRIKDIHGTGFQTERVVKDRIKVFGKLSEISSLKTEYIEKELDLDSDTGWEIFPNPSYVFIDNNIPIYISTNKTFKNGSSEFIKLRRKEKPEEMKMRGEDKKEKRDIASMIGNAGSLNSKTPLAMLSLNEMPALLYEILVKKTTPEEIELIIKEKLDSHFENIKNYDPEKPLPASQISKRLRNNTTDKGKKVINPEKLIHLINKEIDATEAKFALLAKNRKELKEKFRGKPLRQTIFSNMELGREATWLADDIKRFMPDILRKNWKGYQHNQLQQSLAFFNSRPKEAFTILQDGWDFADGSSFWNGWIINSFVKNRSFEYFYEAYFEGRKEYFSSLAENIKQHTSNHRNLRRFIDQQMPKGLFENRHYLLENLETEKNKILSKPLVFPRGLFDTKPTFIKGIKVDEQPELFAEWYQYGYSTEHVFQNFYGWERDYNDLLESELEKDNDFSKNSIHYSRTSQLELIKLKQDLKIKKIKIQDLFLKLIAGHIFENIFKYPASFSLDELYLTQEERLNKEQEALIQSQRKEGDHSDNIIKDNFIGSKTVTYESKQISEPNVKLKDIGKFNRFLLDDKVKTLLSYNEDKVWNKNDLDLELSIGENSYEVIRREKLFKKIQNFELQTLTDWPWNGTDHPEEFGTTDNKGVNHPNFKMYVVNGILRKHTDWFKEGEDNWLENLNETHFKNLSFQELETKSKSIQTAFLIIMIRNQFAHNQLPAVQFFEFIQKKYPEIQGSTTSELYLNFINLAVVELLELLEK

SEQ ID NO: 28 - protein, 1036 aa, Unknown
  source: /note="Description of Unknown: Cas13 sequence"
METQILGNGISYDHTKTEDKHFFGGFLNTAQNNIDLLIKAYISKFESSPRKLNSVQFPDVCFKKNDSDADFQHKLQFIRKHLPVIQYLKYGGNREVLKEKFRLLLQAVDSLRNFYTHFYHKPIQLPNELLTLLDTIFGEIGNEVRQNKMKDDKTRHLLKKNLSEELDFRYQEQLERLRKLKSEGKKVDLRDTEAIRNGVLNAAFNHLIFKDAEDFKPTVSYSSYYYDSDTAENGISISQSGLLFLLSMFLGRREMEDLKSRVRGFKARIIKHEEQHVSGLKFMATHWVFSEFCFKGIKTRLNADYHEETLLIQLIDELSKVPDELYRSFDVATRERFIEDINEYIRDGKEDKSLIESKIVHPVIRKRYESKFNYFAIRFLDEFVNFPTLRFQVHAGNYVHDRRIKSIEGTGFKTERLVKDRIKVFGKLSTISSLKAEYLAKAVNITDDTGWELLPHPSYVFIDNNIPIHLTVDPSFKNGVKEYQEKRKLQKPEEMKNRQGGDKMHKPAISSKIGKSKDINPESPVALLSMNEIPALLYEILVKKASPEEVEAKIRQKLTAVFERIRDYDPKVPLPASQVSKRLRNNTDTLSYNKEKLVELANKEVEQTERKLALITKNRRECREKVKGKFKRQKVFKNAELGTEATWLANDIKRFMPEEQKKNWKGYQHSQLQQSLAFFESRPGEARSLLQAGWDFSDGSSFWNGWVMNSFARDNTFDGFYESYLNGRMKYFLRLADNIAQQSSTNKLISNFIKQQMPKGLFDRRLYMLEDLATEKNKILSKPLIFPRGIFDDKPTFKKGVQVSEEPEAFADWYSYGYDVKHKFQEFYAWDRDYEELLREELEKDTAFTKNSIHYSRESQIELLAKKQDLKVKKVRIQDLYLKLMAEFLFENVFGHELALPLDQFYLTQEERLKQEQEAIVQSQRPKGDDSPNIVKENFIWSKTIPFKSGRVFEPNVKLKDIGKFRNLLTDEKVDILLSYNNTEIGKQVIENELIIGAGSYEFIRREQLFKEIQQMKRLSLRSVRGMGVPIRLNLK

SEQ ID NO: 29 - protein, 1161 aa, Unknown
  source: /note="Description of Unknown: Cas13 sequence"
MENQTQKGKGIYYYYTKNEDKHYFGSFLNLANNNIEQIIEEFRIRLSLKDEKNIKEIINNYFTDKKSYTDWERGINILKEYLPVIDYLDLAITDKEFEKIDLKQKETAKRKYFRTNFSLLIDTIIDLRNFYTHYFHKPISINPDVAKFLDKNLLNVCLDIKKQKMKTDKTKQALKDGLDKELKKLIELKKAELKEKKIKTWNITENVEGAVYNDAFNHMVYKNNAGVTILKDYHKSILPDDKIDSELKLNFSISGLVFLLSMFLSKKEIEQFKSNLEGFKGKVIGENGEYEISKFNNSLKYMATHWIFSYLTFKGLKQRVKNTFDKETLLMQMIDELNKVPHEVYQTLSKEQQNEFLEDINEYVQDNEENKKSMENSIVVHPVIRKRYDDKFNYFAIRFLDEFANFPTLKFFVTAGNFVHDKREKQIQGSMLTSDRMIKEKINVFGKLTEIAKYKSDYFSNENTLETSEWELFPNPSYLLIQNNIPVHIDLIHNTEEAKQCQIAIDRIKCTTNPAKKRNTRKSKEEIIKIIYQKNKNIKYGDPTALLSSNELPALIYELLVNKKSGKELENIIVEKIVNQYKTIAGFEKGQNLSNSLITKKLKKSEPNEDKINAEKIILAINRELEITENKLNIIKNNRAEFRTGAKRKHIFYSKELGQEATWIAYDLKRFMPEASRKEWKGFHHSELQKFLAFYDRNKNDAKALLNMFWNFDNDQLIGNDLNSAFREFHFDKFYEKYLIKRDEILEGFKSFISNFKDEPKLLKKGIKDIYRVFDKRYYIIKSTNAQKEQLLSKPICLPRGIFDNKPTYIEGVKVESNSALFADWYQYTYSDKHEFQSFYDMPRDYKEQFEKFELNNIKSIQNKKNLNKSDKFIYFRYKQDLKIKQIKSQDLFIKLMVDELFNVVFKNNIELNLKKLYQTSDERFKNQLIADVQKNREKGDTSDNKMNENFIWNMTIPLSLCNGQIEEPKVKLKDIGKFRKLETDDKVIQLLEYDKSKVWKKLEIEDELENMPNSYERIRREKLLKGIQEFEHFLLEKEKFDGINHPKHFEQDLNPNFKTYVINGVLRKNSKLNYTEIDKLLDLEHISIKDIETSAKEIHLAYFLIHVRNKFGHNQLPKLEAFELMKKYYKKNNEETYAEYFHKVSSQIVNEFKNSLEKHS

SEQ ID NO: 30 - protein, 848 aa, Unknown
  source: /note="Description of Unknown: Cas13 sequence"
  MOD_RES (821)..(822): Any amino acid
MEKTQTGLGIYYDHTKLQDKYFFGGFFNLAQNNIDNVIKTFILKFFPERKDKDVNAAQFLDICFKDNDADSDFLKKTKFLRMHFPVIGFLASNNDKAGFKRKFSLLLKAISELRNFYTHYYHQPIEFPSELFELLDDIFVETTSEIKKLKKKDDKTQQLLNKNLSEEYDIRYQQQIERLKELNAQGKKIPLNDETAIRNGVFNAAFNHLIYKDGGDLKPSRVYQSSYSEPDPAENGTSLSQSSILFLLSMFLERKETEDLKSRVKGFKAKFIKNGEEKISNLKLTATHWVFSYLCFKGIKQKLSTEFHEETLLIQIIDELSKVPDEVYSAFGAKTKQKFVEDINEYMKEGNADLSLEDSKVIHPVIRKRYENKFNYFAIRFLDEYLSSTSLKFQVHVGNYVHDRRIKNINGTDFQTERVVKDSIKVFGRLSKISNLKADYIKEQLSLPNDSNGWEIFPNPSYVFIDNNVPIHIQTDEATKNGIKLFKDTRRKEQPEELQKRKGKLSKHNIVEIIFKETKGKDKPRVDEPLALLSLNEIPALLYQILEKGATPEDIELIIKNKLAERFEKIKNYDPETPAPASQISKRLRNNTTAKGQETLNAEKLSILIEREIEDTETKLDAIEEKRRKAKKEYRRNSPQKSIFSNSELGRIAAWLADDIKRFMPAELRKNWKGYQHSQLQQSLAYFEKRPQEAFLLLKEGWDTSDGSSYWNIWVINSFSETEDFEKFYENYLRKRAKYFSELAGNIKQHTHNAKFLRKFIKQQMPADLFPKRHYILKDLETEKNKVLSKPLVFSRGLFDSNPTFIKGVKVTENPELFAEXXNGIATGTKRNIPSSISMAGKETIMSF

SEQ ID NO: 31 - protein, 1241 aa, Unknown
  source: /note="Description of Unknown: Cas13 sequence"
  MOD_RES (644)..(727): Any amino acid
MEQNKLGKGIDYNPFKTVDKHYFGGFFNLADNNIQEVFDEINIRYKNGNLKPKVAIERYTTENTSLVEYEKFVAILTEYFPIVKEIDQKNKKDSNDKVIEKTRIERITDFRDAFILFIETIEKLRSYYTHYQHDDITIDNQLFIHLDKILLNTVLETKKKYLKTDKTKELLKNSLQAELKELYHLKINQLEQKKNEVDALIKEQKSKGKKTDKPFKYSKDRDQIINSIYNDAIRPFLYENANKVELSDKKKTAFNEKDASASERDFNLPISSSGIIFLLSCFLNRKEIEDLKANIKGYKGKVIKGETFDLEKNSIRFMATHRIYSVMCYKGLKNKIRTSESATKETLLMQMIDELSKIPDIVYKNISTDLQNTFTEDWNEYYKDNIENNENLENSKVIHPVIRKRYEDKFNYFAIRFLDEFVDFPSLRFQVHLGNYIKHSMPKNIGSVTTTREIKNKIFVFGKLNEINQSKNDFFNKNKEEEQETNWEIFPNPNYHFPMENSDELKNANKIGIYIDLKDKRKKDTLNEAIKKREKETSIYKKDLVHQIIDKNLDMHIGQPVAYLSMNDIHAIIFSILSQNVFTKDNKLNGGDIEKKIKDQINNQITEITEKDASIKILKNHSDNNSNYPNTHKLYDDISNEIEXXXXXXXXXXXXXXXXXXXXXXXXXXXXXXXXXXXXXXXXXXXXXXXXXXXXXXXXXXXXXXXXXXXXXXXXXXXXXXXXXXXXNEIEVLDKLMQKHEKRVKEYINTQEDKKYKPARKHILYNSEKGEIATWLANDIKRFFPKEFKENWKGHYHSEFQRNLAYYETNKKEVKTILNDLDYRKEIPFIDFSKNTLADFYFEYLKKRKIYHKNLWVEVNKLIKGENINKEKLFDNCFRIYKRKNYVSNVIDEKVNTILSNPIFIERGFIDEKPTIIPKMPLEGNEEHFAAWFVAFKSFKNNEFQNFYDTNKYPLETKDKTNSELKKIQTKTYNQKKNDWATWLIVQYIFKDIFSTDLQNVKLSELFQTREQRIQNQVKALDGERNQNFIWNRTIDLQLNEKIKIPNVKLKDIGNFRKYVNDSRVEAFLRYNDITQWMAYLPSNWQKEDESKPKPVNVIQLQLDDYEKIRREELLKEVQKLEKTIYNNTNVKTVLLQDGNPNFKNYVLNGLLEEIKGINISAFTVLHEKTNFDKIDFNVLENCSEIEQSATLIILIRNKFAHNQLPSSDCYQFCSKILTRDTEQTYANYYLKLFMILKDKL

SEQ ID NO: 32 - protein, 1147 aa, Unknown
  source: /note="Description of Unknown: Cas13 sequence"
MEETTTMGKGVAYDHTLFKDKHYFAGYLNLAVNNIENVFKTVYKNRFDIKQHNLYKILDSLDGQISEPDYIERVSFLKQYFPVLHYLDLHPDNKRFTKEEDKVKARRRYLINNLRLLIETLSKLRDFYTHYYHKPLSIEQNTFSLIDNIFLNVVIDVKRQKKKNDHTRQLLKDSLKEEMDILYQKTKASLKEKQKENTRIKLDSETINNTIFNNSFSHLIYRRKKADNDILSASCKSEYKGEPTENGINVSVDGLLFFLGIFLSRKESNDLRGRIKGFKGTVIKDLPDFPNEKNNSLKFMATHWVFTYLNIKPIKQKLNTNFSRETLLLQIVDELTKIPNEIYRNLCFKKQQEFVEDINEYIKEGDDIDTLNSSTVIHPVIRKRYENKFNYFVLRYLDEFVSFNSLRFQIYLGNYVHHIQRKKLSGTEYETERVIKEKINVFGKLSEVSNIKGDYFIQNNPDNEALGWEIYPNPSYNFTGNNIPIYFDINDQDKEKINEYKSIRNFSEKRILRKKNKKNKQEIFDLINNTLTTRVFTAEPTAILSLNELPALLYTILCENKTASEIENLLRRTYLKRLNTIKNYQPGTLPQSKITKNLNKSTNQESLDVSKLIKAMKHEISISNEKLTLIKKNQNEVKDTSHRRKYVFNSKELGIEATWLANDLKRFMPKKVRENWKGYMHSQLQNSIAYYSQKPKEALSILSSVWNFNDDNYIWNEGIKKAFNEKEFEKFYCKYLASRNKTLEKLKENLDNLEYKTDKRKLDKFIKQQNLDCLFHIRTYTIDSTQEQINKLLAKPLVFPRGIFDSKPTFVKNESVTEKPELFADWYTYTYKEHPLQEFYSFTKDYECNFKKEKLTVKEFVKNQEQLNPEEQLNLFKLKEDLSIKCIKNQDLFLKLVVDNIYNKIFEYNIDISLKNLYISRKERIAIGLKAKELNQINDSYIWGKTILYQDKQIRETKVQLKDINKIKRFLEEDKVKQILSYDINKQWEIEELKYELYIKPNSYEVIRREKLFKAIQEFESYILTINNFDGSNHPSILEYNSNPRFKHYVVNGLLLKKGLATNEEIEWLLAKGQKEFNTFDKSIVEKPEIIQKAFLLVLIRNKFAHSQLPIKEYYEMIRSYTKNIENLNTTEIIFQFTTNTINELKR

SEQ ID NO: 33 - protein, 1108 aa, Unknown
  source: /note="Description of Unknown: cas12b sequence"
MATRSFILKIEPNEEVKKGLWKTHEVLNHGIAYYMNILKLIRQEAIYEHHEQDPKNPKKVSKAEIQAELWDFVLKMQKCNSFTHEVDKDVVFNILRELYEELVPSSVEKKGEANQLSNKFLYPLVDPNSQSGKGTASSGRKPRWYNLKIAGDPSWEEEKKKWEEDKKKDPLAKILGKLAEYGLIPLFIPFTDSNEPIVKEIKWMEKSRNQSVRRLDKDMFIQALERFLSWESWNLKVKEEYEKVEKEHKTLEERIKEDIQAFKSLEQYEKERQEQLLRDTLNTNEYRLSKRGLRGWREIIQKWLKMDENEPSEKYLEVFKDYQRKHPREAGDYSVYEFLSKKENHFIWRNHPEYPYLYATFCEIDKKKKDAKQQATFTLADPINHPLWVRFEERSGSNLNKYRILTEQLHTEKLKKKLTVQLDRLIYPTESGGWEEKGKVDIVLLPSRQFYNQIFLDIEEKGKHAFTYKDESIKFPLKGTLGGARVQFDRDHLRRYPHKVESGNVGRIYFNMTVNIEPTESPVSKSLKIHRDDFPKFVNFKPKELTEWIKDSKGKKLKSGIESLEIGLRVMSIDLGQRQAAAASIFEVVDQKPDIEGKLFFPIKGTELYAVHRASFNIKLPGETLVKSREVLRKAREDNLKLMNQKLNFLRNVLHFQQFEDITEREKRVTKWISRQENSDVPLVYQDELIQIRELMYKPYKDWVAFLKQLHKRLEVEIGKEVKHWRKSLSDGRKGLYGISLKNIDEIDRTRKFLLRWSLRPTEPGEVRRLEPGQRFAIDQLNHLNALKEDRLKKMANTIIMHALGYCYDVRKKKWQAKNPACQIILFEDLSNYNPYEERSRFENSKLMKWSRREIPRQVALQGEIYGLQVGEVGAQFSSRFHAKTGSPGIRCSVVTKEKLQDNRFFKNLQREGRLTLDKIAVLKEGDLYPDKGGEKFISLSKDRKLVTTHADINAAQNLQKRFWTRTHGFYKVYCKAYQVDGQTVYIPESKDQKQKIIEEFGEGYFILKDGVYEWGNAGKLKIKKGSSKQSSSELVDSDILKDSFDLASELKGEKLMLYRDPSGNVFPSDKWMAAGVFFGKLERILISKLTNQYSISTIEDDSSKQSM

SEQ ID NO: 34 - protein, 1468 aa, Unknown
  source: /note="Description of Unknown: cas12b sequence"
MATAVDTSTTRAYTLRLSGGNNWRELLWQTHVAVNRGAWVWGDWLLTLRGGLPASLADGDAERRVVLALSWLSVESPASLAPQAHIVAYGSDARDERNRKVTERFRDILRRMGIKQQQEQEWLDACLPALMASIREDAVWVDRSACFAEAQQCYRGLSSEWARKTLFDFLGGEDDYFKPSAKEGASSKAKDFVQKAGRWLSRHWGAGKKSDPRDISTRLGKLAGVDPKAIDGHTGRAALEDLLRTLGSRPAQNADAEKLYRQLKRAVGWKGRPSKGAVALKKIRDAERVPNDLWKEIASTLREEAAVQSSQTSDHAAVPDWRSHWPAEITGLPMPYRVDRDYIWEHGVMLDHALRRVSSAHTWIKRAEAERRRFQQDAAKMGSIPEEARNWLDAFRERRSSSSGATGDYLIRERAINGWDKVVQAWETLGPNSTRDQRIAAARDVQANLDEDEKFGDIQLFAGFGDEHVDDPERCLADDRATCVWRNSSGRADGRILKDYVAATVAEHNQRRFKVPAYRHPDPLRHPVFVDYGKSRWSINYSALTAAQQRRKTTQKLAQAKTDNTRAKLQQQLASTADLRSVTLGVWDGNRIVKISQRWRSKRFWRDLDLDHFGSHPSAAVSRADRLGRVAARQDPGAAVYVAKVFEQQDWNGRLQVPRRELNRLADVVYGKGADPDFGKLERLDPRARRLWERLSWFLTTSATVQPQGPWLDYVAAGLPSGIQYTKSRAGYYLNYDANHGRKGRARLCLARLPGLRVLSLDLGHRYAAACAVWQTLTIEQMTNECRQAAHPAPSNDDLFIHLRHPTHKPQKSGRKKGRPVTKTTIYRRIGPDKLPDGTDHPAPWARLERQFLIKLQGEDRPARYASQKEIDEVNQFRNFVGLEPIVDRPRVDDLHSDAVRVARLGLRRLADAARIAFAMTAAKKPISGGHEVELTTAQRIEFLQDALLLWQSLAASRRYRDDWAEKLWQSWVVEKLGGPQPAEIADDLPRSQRAASLKTARQSLRKVAEKLSDGQSPSAAELHRLWAERWQQRQTEWRRHLRWLRRLILPRRKDHQQEDRPLQRVGGLSVKRIQTIRQLYQVLKAFRMRPEPSDLRKNIPAPGDRSLASFGRRILNHLERLREQRIKQLASRVVEAALGAGRISKPPGRDRRRPQQPVDRPCHAVVIENLQHYKPEDSRLRRENRQLMDWQARNLRKYIVEGCELHGLLFVEVSPAYTSRQDSRTGAPGLRCEDVSRTALQEAARRMHASHSRPSNSSPGGSQTQFEREVCRWINEFKRVEGSSSSLSARQAVLKAFLHHQASIPTSLSTILLPRRGGELFVSADPDSPLACGLQADLNAAANIGLKALTDPDWMGAWWFVLVDRASGQPVEEQVQGCPIWLSCGPLSNSNPATIDPSDSPTAARRSNGTGAKGRARANEYWWSSLSATTLPDHKAWQPTQDYWRDIEQRVVKRLLRLLDGSEWSED

SEQ ID NO: 35 - protein, 1375 aa, Unknown
  source: /note="Description of Unknown: cas12b sequence"
MNRIYQGRVSKIEIKDSEGNFRNVPVGSPDTCPLWRHHRIFQDAVNYYLVALGALAGTGSENAFVGLGSKDRVIHDLYSRLFDSWERFPRDMHGASSLRDSLRRTLPGLSERASLQDAFDAILSGNEANARERVLSLLSLIQDLGGDIQKGSKRYFPFFCEPATKATFPRARVGLLKVEGKDFVPRLLWSSDLEIAPDQVVEQLKFEYFANPNESVQPIEGNEARVRLIEALDNPQLGIELPIEILSDLRKRVHLIETDIRIPRYFFGGAGAELRKFRLDLFLIAAYVTPDPSILRALRNSFKEPSASKSSKKKDETEEVENLLRSLGDDPLILARGERGFVFPSFTSLPTWVGANAQKPIWRDFDIAAFAEALKSLNQFTAKTEEREEKLKKAEETLHYMLGISDAIPRSSDSETEEQAPSRPGKDPRWPLVAQLEKELGENLSEGTWQLSRSAMRGLRDIIGLWRKHPGASVVTLQKDVKTYQADEKHKREIGSVQLFLLLCEERYHALWQTETDDERGDESEENDDPARILSDAIEVHQIRREVERFREPIRLTPAEPVFSRRLFMFSDLTDKLAKVKFGETTEENSEVKSQFVEAAIALKEGENLKEARVRITFSAPRLHRDELLGGAESRWLQPITAALGFSNPAPSVKFDSAVALMPDHMDDGRIRHLLNFPVNFDSAWLHQSIGKADLWKSQFNGTKDKNLHLHWAGTARDTTRKNTWWENRTIIENGFTVLSNDLGQRSAGAWALLKVTCSRPDTKHPVRSIGHDGTREWFATVLATGIHRLPGEDQRILKNGKWATEQSGKKGRNATFSEYEAACVLAKNLGCESVENWLGMSGEKSYPALNDQLVKIANRRITRLGTYHRWSCFSPEKFEDPARRANVIGGQLAELSAYQDENVTVSADILKSGDFEGFRHRAGAAFEALRTELEVHLVNLANLTAPLRQKVWSWQKRPDSSGYGDLLMVDLDDCHPKIRGQRGLSMARLEQLEGLRRLFLRYNRSLDRSPGIPAKFGREDVGRTSGEPCQALLVKIDRMKEQRVNQTAHLILAQALGVRLCPHRIEENERKSRDLHGEYEKIPGREPVDFIVIEDLSRYLSSQGRAPSENSRLMKWAHRAVRDKLKMLAEEPFGIPVVETVPAYSSRFHALNGQAGSRLHELHELEAYQQQSLINLAAKTDFQNRDRSKAAGELFEQFQALAKLNERRRAEGKKVPRTLYYPKSGGPLFLASRDGDTIHADVNAAINLGLRAIAAPACIDIHRRLRATKEKEVYRPRVGNAREKSAFSKDDIIQPSGAPSKKFASSSSPNFFYEPEDLKQANGEPLFDRAMFGEYSLVSGVSLWSMVNNAIYIRCVELNRTRLHGKDPDDQIPM

SEQ ID NO: 36 - protein, 1254 aa, Unknown
  source: /note="Description of Unknown: cas12b sequence"
MSITRSIKVKLIVPRDASLEARQLREGLWATHLFVNDGCHYYERLLLEFRQRDVCVGKDDAGKDVIVPAAEWADRLRARLGRNGMVPSHIEAALPIFRELYENMVPSALKAKSGTGQAGRSWHSKLVSPTSRGGEASAARIDVLRPLLPVSGDDPAFEPAARALIEEAGDELLTSTGRCPAWVTAYRKGPEGSAWVEKLRIQLREAVEAGDFDPPSDPQILAAGAVPAAPPLGAGIDALRPLLPLLGGDPAFEPAARALVEDIGDELFTSTGRPPTWVTAHPTWVRAHRKDAECLEAADDFKWVERLRQRLRDDAKAGKFEQPLHERLGALGALPVAKPIGAGRVVSRADLTVFERGAMELAIEHLIGWESAGHRARAQYVERKKRHDDLLQWIEAEAPDALLAVRAYEAARTIHLATLGELGAAPQYTLRLREIRPWRKLREWLLQNPDATIDERRRRLATMQTNDPRGYGGEALAWLAAPERRALVEHPAGDVVTRIAVLNIRKSILDRSRLFPTCTLADPVEHPRFAKFGKPGDKNSAGYALAVDGVRREAIIKILVPRQDGLLVPTDLRVPFAPSGQMRDLRASGLDISYERQDGRGRQAAKLQGGNLMFDRTHFARCGAPGPEALGSVWIKVALDLSSPAASLAMKTATPVRTYLSTAVRGRPESTKYEKAAPPEGFRVLSVHMGLRTAATASMLRFGAPEEGGHEVPVSGLAGETLVAFHERTVTMKLPGEDPDTRTEANRGVAKRELRGLGRGIGCLKAIRRASASATPEDRAEALVIIETHVGQGDRHGWAPAEAVGRLDPHGDPDDWKTACAALYAAVEADLGVAISSWRKAARAGGATGMLGGKSLWAVDHLERSFRFLRSWDLRARPHDGDPRRPRPGYASKLLHHIDGVKDDRVKTTADRIVQAACGRAWIGGPTVKRGTQDVRLPGRWEQRGPRADLILLPDLTHFRFRSDRPRAENSRLMRWAHRQLAIYVRMQAEVEGILVADTGAAFTTRFDAWTGAPGVRCEPVTADHLRGIAKREDYWLARLLREGALKHLRIDPASLRVDDLVPMDHGKILVALDGVDLPGLRILDTDVNASQGLGRRYIEGHGLAYRLPGARVPRGEGEREAAVVHIKGKRLASAMGGTVVVLRASEGPGDITWTAEVYDRPQGARKALGLSLAAFNSIATAAVDDEGPAPENDDEALEEEAEEALGIATGERIVFFRDPSGAVAGGGWLEASAFWGIANRMVTDRLRELGRLG

SEQ ID NO: 37 - protein, 1388 aa, Unknown
  source: /note="Description of Unknown: cas12b sequence"
MSLNRIYQGRVAAVETGTALAKGNVEWMPAAGGDEVLWQHHELFQAAINYYLVALLALADKNNPVLGPLISQMDNPQSPYHVWGSFRRQGRQRTGLSQAVAPYITPGNNAPTLDEVFRSILAGNPTDRATLDAALMQLLKACDGAGAIQQEGRSYWPKFCDPDSTANFAGDPAMLRREQHRLLLPQVLHDPAITHDSPALGSFDTYSIATPDTRTPQLTGPKARARLEQAITLWRVRLPESAADFDRLASSLKKIPDDDSRLNLQGYVGSSAKGEVQARLFALLLFRHLERSSFTLGLLRSATPPPKNAETPPPAGVPLPAASAADPVRIARGKRSFVFRAFTSLPCWHGGDNIHPTWKSFDIAAFKYALTVINQIEEKTKERQKECAELETDFDYMHGRLAKIPVKYTTGEAEPPPILANDLRIPLLRELLQNIKVDTALTDGEAVSYGLQRRTIRGFRELRRIWRGHAPAGTVFSSELKEKLAGELRQFQTDNSTTIGSVQLFNELIQNPKYWPIWQAPDVETARQWADAGFADDPLAALVQEAELQEDIDALKAPVKLTPADPEYSRRQYDFNAVSKFGAGSRSANRHEPGQTERGHNTFTTEIAARNAADGNRWRATHVRIHYSAPRLLRDGLRRPDTDGNEALEAVPWLQPMMEALAPLPTLPQDLTGMPVFLMPDVTLSGERRILLNLPVTLEPAALVEQLGNAGRWQNQFFGSREDPFALRWPADGAVKTAKGKTHIPWHQDRDHFTVLGVDLGTRDAGALALLNVTAQKPAKPVHRIIGEADGRTWYASLADARMIRLPGEDARLFVRGKLVQEPYGERGRNASLLEWEDARNIILRLGQNPDELLGADPRRHSYPEINDKLLVALRRAQARLARLQNRSWRLRDLAESDKALDEIHAERAGEKPSPLPPLARDDAIKSTDEALLSQRDIIRRSFVQIANLILPLRGRRWEWRPHVEVPDCHILAQSDPGTDDTKRLVAGQRGISHERIEQIEELRRRCQSLNRALRHKPGERPVLGRPAKGEEIADPCPALLEKINRLRDQRVDQTAHAILAAALGVRLRAPSKDRAERRHRDIHGEYERFRAPADFVVIENLSRYLSSQDRARSENTRLMQWCHRQIVQKLRQLCETYGIPVLAVPAAYSSRFSSRDGSAGFRAVHLTPDHRHRMPWSRILARLKAHEEDGKRLEKTVLDEARAVRGLFDRLDRFNAGHVPGKPWRTLLAPLPGGPVFVPLGDATPMQADLNAAINIALRGIAAPDRHDIHHRLRAENKKRILSLRLGTQREKARWPGGAPAVTLSTPNNGASPEDSDALPERVSNLFVDIAGVANFERVTIEGVSQKFATGRGLWASVKQRAWNRVARLNETVTDNNRNEEEDDIPM

SEQ ID NO: 38 - protein, 1172 aa, Unknown
  source: /note="Description of Unknown: cas12b sequence"
MPTRTINLKLQISPKTDEGRKIRSALWTTHSEINKAVAEIEKLLLLCRGEKYYTTNSKDEEVEVPEPQVKTDALEMARAVQAKNGKAGTGSDEEVLSALRMLYEATVPSSVLDDKGKPLSGDAQSIGGSYAGPICDPETCRIKDVDRLFESGPFAETASKKFTQLPAWFNEVTKKNFNKDEPEKFVKVGKDKDEKFYEIDLRQADAWYESPEVKDIVSKNKAFNKDKWWKNKRDGVDTWAAEFVKKQFDLRKDVRVSIREELWDRLGLLPLGSLYFKKPVGNKWNRMAFRLAIAHLLSWESWNHQTLAEYTKYTKYKDGLIELAGASRSLEVRFEPLRQYQKERHEELSRTSFVDDDRPFTIGARMIRAWGRVREAWRNKGDGIDERRQILADLQTELKGKFGDPHLFLWLAEAGRESLWRDEDVLTTFVEINIAQRDLERHRPYSLMTFADARLHPRWAMYEALGGTNLRNYELTPEGKVKIPLLICEKDKLSEKTFTIPLAPSGQLKSLEIKSLPKKKVKISYASAHQFYAGIPGGSEILFDRLFMENRASSALANGSCGPAWLKLTVDVESKAPPEWLDKKGRVQTPPTVHHFKTGLANKSKHTDKLEPSLRVLSVDLGLRTFASCSVFELVDEKPAKGLFFETDHPHLWAKHERSFKLTLPGEEAGDDPKVAQARREAMDEVYSLRRDMYRLKDILRLKIISAPNERREKLESKIAEMREKQDARAVVTSNFFERLSEKCDLNPPMWEHSCNEIHRDAEKAFSARIGEWRKRTRKRPGSWEEWRETRSYHGGKSYWMIEYLEAVRKLLIGWSTHGRDYGEINRQNKKRYGTVASKLLKHINKLKEDRTKAGTDLIIQAARGYIPLPGKGWMEKYRPCRVILFEDLARYRFKVDRPRRENSQLMKWGHREIINEATLQGEIYGMVVETAGAGFSSRFHAKTGAPGVRCRYLKEDDFENGAPKEFLVRQMKNLMKGDRLEPGLLVPWDGGELFATVDNGKPIVIHADINAAQNLQRRFWTRFADAYRVNAVEENDNWVVTDTGVRVLGALEMAVHGEADRKPRTGFTLHGTLQSGAELKAEGKKTDIKDVEEDKDDSISSEIIELQDEKERKGRETFFRDPSGGILDPGKWYGSKRFWGRAKGAVTEALLDNQGANNALEEKPGNDELPF

SEQ ID NO: 39 - protein, 1108 aa, Unknown; identical to SEQ ID NO: 5
  source: /note="Description of Unknown: cas12b sequence"

SEQ ID NO: 40 - protein, 1450 aa, Unknown
  source: /note="Description of Unknown: cas12b sequence"
MYRGFCTVTATSGGWQSTTFLAGAQMADTTTRAYTLKLQGDRLALWRNHVIFNNGVKAWGEWLLCLRGGLPASLADHRDSLDVSKGEISRTFKERTAAITPATIRQELKFKAATEKKVREEVASRRKKVTETAVAKELLAARRSELRRILALSWLCPETPVQLVPQAAIVAAADDSDREQKVLDGFRQILKRKGVSDVAGWVQDCDATLRATIRSDAVWVDRTACFCSMPRAVRPSEVDAAKHLFRLFGSMSDYFATASASSGPAEPKDFANTCRDWVSSFWGGGEKSNKASILAALSAIAQIKPTRVVGKRGPAALAVIAGVLEQKPVDDSVEALARAIGWLSGRPSAARLAINAIAASPRVSQKLWDRLVLACEKDCGRQKSKLAFEGSASTIASALEPRLAGLTGMPYASTGRELIGEYATMLAFAMRRVSQIHTKAKQAEAERRSFAPEQARLALVPSAARKWLEDYVEARTAASGAVDGYQLRKRALGGWADVVAAWSRCETSEDRIAAVRELQADWEKAGDVQLFEALAADDAICVWQSANGKTAASILTDYVRAAVADQNATRFKVPAYRHPDPLRSPTFVGFGNSQWSIAYSAQGEARERRKLLDRASGSAKDAERAREGLAREAVLQNVSLDLWAGDKMVPTQFRWQSRRLLSDLALHSVPAMKGAKVTRATRFGRARIAAGPVLLDGIADDTPWNGRLQAPRRQLEDLARILDAKGLPFDDESKWPPKVRSRLKHLGWFLTHSAKLTPSGPWLDYVAGGLANGWKWAEGREGACLFREDNKDRKGRAKLILSRLPGLRLLSVDLGLRTSAAAAVWQVVSKRQLTAAKDGAKSVSDTDLFCLVRTGDRTQVYRRIGLSAWARLERQFLIRLDGEKAAARPATTNEWESLQSFRAWLGCGIERRPEKLPPVDSLQQSAERLCRLGLRRLSDLARVAYLLTAKERPIMGGRTAPLDEEGTVQAAQDALSILHALGSSEDFSDARLQGIWRTAIGDTPPLAARLTKKQRQELREALRPAAEKLRGKAALGKELADLWKERSAAWAKHLRWLRDWVIPRFDKRKNGERVRSARGVGGLSLDRIATIRGVYQIMRAYASRAEPTNLRAGVERLEKAAAKKLRPEFGRRMLAKMERLRENRVKQIASRIVEAALGVGSEDRLHWERGRRRPTAAISDPRFAPCHAVVIENLENYRPDEKRTRRENRGLMSWAARAVGKYLAEGCQLHGLYLRQVSPAYTSRQDSRTGCPGLRCNDVRAQELLNPEGWIGRLVARAAEAVKEGKATPRQRLLVTLAESARAGIAESAAVRIIAPGGQLFIAADPQSPASNGIHADMNAAANIGLVALLDPDWPAAWWRLPCKAATGYVDESKVGGSEAVPLGRAILEVGAEAGKVYVNAWSDPQDSAVSRREWTDTKRYWRDVEERVVEILLASNRGGRRGKPGAVPF

SEQ ID NO: 41 - protein, 792 aa, Unknown
  source: /note="Description of Unknown: cas12b sequence"
MATKSFEAKIVCKPDEKYTAEQKKQFLWFTHQVFNDGVRKVIPYVFKMKRGELGPEFQAIYYAITSSQDAIGKLEAVINPDWTSGKIGKSDPNKWKELLKYQELEKGFRQRLKEEGIKSTKKFRKELEDEKKKLAKEIGQKDIWADAAAILRNKNLLLFNRDELLPNLPSEFRRKIYEMTIQLIHGHQELVANWEDEHAEWLIEKDKWEEEHPEYMNVRPIFEKFEKEQGKVKGSRIRWLAYLDFLSSKPELANWRGKAKETIPLTKEERAGFRKPGQHFAAFFNKNPELQELDRLHKEYQEKFARTQSKRTPHPDGFKHRPTFTLPDAMRHPVWYSFKGATDPTKGSTYRNLDLENCTLDLKVLTAMEGEGRNPGGMIQYAFEPDERIKGFRYVGTTEKGKRAKGYIYYDPILEKERPAKIQGIKLVFRPPRPDGTAYLIFSCQIEDEKPKIKIWKDKEEESPGEITKRKKTEVYPPELITLAIDFGQRHLGAITICKNNNGRPEPIRFIPAYPKRRKDRESKPVSAWLAKIPGLTFNAVGMHEKEISAGMSRRFQDPKSIRQAGEKEGRKSKGQHIPETETPWAHLREHIANMKEDHYKKAANLIIRTALQNGAQVILIENLRNYRPMLERTNLENRRRMQWAVRQTAKFLEDTARPLGLIVRQVSSAYTSRFCSSCGHPGARVSLPGQKNWEKFYAEKYGKERKMIAVAGGQFFCCPACKKIINADINASLNMHKVFYQNFIWPGKIDKKDTKNFIWQGKNYNWDQIADDVQSFLDQKAGIKKEDDIPY

SEQ ID NO: 42 - protein, 1382 aa, Unknown
  source: /note="Description of Unknown: cas12b sequence"
MAYGSEAPDERNRKVTERFRIILSRMGINQQQEQEWLDACRPALTASIREDAVWIDRSACFAEAQQHYPGLSSEWARETLFDFLGGENDYFALPDPEAAPSSEAKDFVQKAGGWLSRHWGAGKKSDSTAISTNLNRLAGVESKAIVGRCGCDALAVLLTTLGGWPAKNADSGTLYHQLKQAVGWKGRPSRAAKALEKVRDAPEVTDALWRQTADTLRQEAVAQSSRAAGGSGVPAWMPAWREDMEARLGMPYRGARDYIWEHSVMLDHALRRVSSAHTWIKRAEAKRRRFQQDADKIGSIPAKAREWLDAFRERRFSASGALRGYLIRERAIDGWDRVVQAWASLGPNCTREQRIAAARDVQANLDEDEKFGDIQLFAGVGDEDEGDPQPCLADDDAICVWRDLNGRADSNILKDYVAATVAKHDQQRFKVPAYRHPDPLRHPVYVDYGNSRWSIEYSALKAAHQRRKTTEKLVQAKTDRARAKFQQKPADTPDLRGVTLGVWTGSSIEKVSLHWHGKRFWKDLDLDHFGRDPSATVSRADRLGRVAASQHPEAAVHVAKVFEQQDWNGRLQVPRHELQRLADLVYGKGGDPDFAKLGSLDERRTRRQWEHLSWFLTTSTTIQPRGPWLDYVAQGLPQGIQYKKGRNGYYLEYAANQGRKRRARLCLARLPGLRVLSLDLGDRYAAACAVWETLTREQITQECHQAGHPGPSQDDLFIHLRHRTGKPQKSGRNKGKPVTKTTIYRRIGPDLLPDGTPHPAPWARLQRQFLIRLQGEDRPARFASQHEIDGSNRFREFLGLPPLADRPRVDDLHRDMVRLARLGLRRLADAARIAFAMTATKKPISGGREETLATEQRIEFLQDALVRWQALAASSRYRDDWARQAWQEWIVEKLGGPQPAEIADELPRSQQATRVETARRSLREVAAKLSNPQSSSATELHGLWAARWQERQTKWRQYLRWLRRLILPRRKDYQQANRQVHRVGGLSVKRLQTIRQLYQVLKAFRMRPEPSDLRKNIPAPGDPSLASFGRRILHHRERLRQQRIKQLASRLVEAALGAGRISKRLGRDRRRPRQSVDAPCHAVVIENLERYKPEDSRLRRENRQLMNWQARNLRKYIVEGCELHGLLFVEVWPAYTSRQDTRTGAPGVRCEDVPRSVLEEATRRIRALGSAPSGSSRGRSETRFEREVCRWIHEFNRVVGSSSGLSPRQSVLKAFLDHQAAIPTWRSTVRLPRRGGELFVSADANSPLANGLQADLNAAANIGLKALTDPDWMGAWWFVLVKRDSGQPVPQQVQGSPIWESCTRLSSPATVDSSDSPAGARRSKGRGARGRARATEYRWSPLSAMTMPDNKTWWPTRDYWPEIERQIADRLLREQIDPENRF

SEQ ID NO: 43 - protein, 1272 aa, Unknown
  source: /note="Description of Unknown: cas12c sequence"
MKKTSPLKRSALRTARRQIARGCLPIGNRDISTTRTRVLPLADSVADAVWNQARTAALTLRGFGSGSLFDLLLDLHASGLRLFSSNGEREGFLLKQKFDAGKFDRAAAKDVGEDMPKFTAANLRAALVAIPRGGGPDTDAKALATRLARAVGVKATKLDKPPKLLKDMAKELAMAFPTWKELSTANGEVGAVIDDVARMYGLRWPSLRRGWAFRLPEVTRELGSPTLAFDPDAPVIDETSATARFAAIVARYLPECGGLTDSAAAKGVQARITTTNANGLSWLFGVGLRGMRDLPVDTVADTLAIDVTRGRDALRALVNDIKALPRLGEFGDRVYVESRATLQGAVDSLIANYVGRLADLVASADALEHDQPRPPVLDDADWKPAIFDGMGFTPWEVEDMLDARPVEVARLRLALGVLAGTTPAVAGDFARALADVEAFGAWAARTEAVAALINARVKVLKAPESLRLRGVLGGGRWKAVVSIHPDEGEPAQVIPQLDTQLQALLDDGQRAFDVLVADYTPTFAAALEHARSDMRASLADKGREAPSAESIDLLARRKLLDMVARVTRRGSPSLGHAFLAACAVQGLTRPGTATERSLRGHILSGEQALFVHPYARARSIVRLEHAGLLRLDLDALLTAMERDAEQRADVREQIVLRFTRQSLLLGGLPGRIRLAKVPWTQEAAAASGVRGAPWLKLHPDDAGTVARSEVIKAFTARFHLSANGLLYRLNRMRFLERYDIRCFIGDTLLFAPKAGAWTPPEQYRHGKYAHWLSHPDLPRTEGGAVDVVPAARWLTEASRRADEDGRASAVALLAQFPHEWVAACEFEGAPVYEGVFPCEGKIGGWMKRRGYRLAPPRHFAGELLAAFKDASVSPHGLTFEREMLREGTTVRELSRRVVAAYPIAVPTHPDAERPWSPLHLMGLDLGEAGLGVCLRHIGTGAETTLLLPVRKTRLLAHREEHYRRKVQPRQAFRKGYGDAMELAVKAAIGEVCGIIDNLIVRYRAVPVFESAVAQARGSNKMIQRVFAGVVQHYTFVANNGAAQTVRQSHWFGAGRWSYTYGADLLPAARQMTEKQLLKAKAEAVFRPAMGFPGVMASGYRTSLVCACCGEDVLDAVDAAAEGGQVALTTDAEGSGVLDLGGRSLRIKLEAPSPNPIVQKAARRKRRRTPWEALADRTWTLTHKTDRADLVATLRRGLRRPPASVQGHATSGWEFHCAACGHIAQADVNAATNLVRRYDDRVRKMEQARAHWDDPSVRAKLASELAERAAARS

SEQ ID NO: 44 - protein, 1262 aa, Unknown
  source: /note="Description of Unknown: cas12c sequence"
MLTTKFKLELPAGCPLREDAATFDECRKLYDVVEGCGNGTLTGFLFSVILSGFRIFPDGKTAEIFANRSVYDEDEFRSALVEAVGAPLPRFTVKALIKRLQMEVRARGNKDNRFVAEVMMKEYRQTLCGKTLPKGVDESYVDRLFEEMARELTSRYRSWNELKGDLLGACKAVDAALRGFGDFPSLATMVTRAAARRLPKDSTIVFDPQSPCIDVQTIGVDAMPYAAVSTILSYPESVGEKRRDFVQNHLTTPSAAGLSWLFNRGLELFSEESVEELCRLFHVPEDQRTRIVQIQNAARATPRQSFFLKKGGAPLGYHDFRSAFAGRINSWTANYLNRLEELQGLLHDLTDELRLPDLVRNGEDFLATTDCRREEVEILCRSFSRERDRAQTAVEHLIGADPLQVVSDVAAIEEYSRIVNRLCAIKEQIVNSLRQAEDDKASRWTALWSEVKDEFQPWEKLIRLPKLNGMSGGVPPAQDELETILARYSDVGRGASEHFDAVMEWAAKTGAEGDVLKKFAETEQQRADQRAPGKYDGRELALRLVLQRVARVVRDRSDACAENVRQWFLKENVFAERKDFNKFFFNRLGNLYVSPFSNRRHAGYKLSDGLVERSGAVWRELLALVKEMRGAYASFSEAGETFLRLESLLMGMRIGALTKNIPAEVAALRLDDETALESVSEGLKLQLQQAEVPPSVLAKAFNVYVSLLSGCLIALRRERFFLRTKFSFVGNTALVYVPKEKSWPMPSRYEASPSWTPIFENDVLVRLSTGEVEVAETFRRAVALWGRTTDPVLKKALRELFHQLPHDWCCQVSVRSSGDMTPAKRKEDDRDVLIVEKKGKYDSTIISKKIAATALVRLVGPSTHKERLNRLLLDVGEVACDMTLLADQEILQKVEDDRVHLSPGKLQFSLSVPISTPAEQCEDEVKSERKSTHFRRIVAIDQGERGFAFAVFRLEDAGKKGAQPIAQGFVNIPSIRRLIARVHSYRKGKQSVQKFSQRFDSTMFTLRENVAGDVCGAIAGLMSRYRAFPVLERQVSNLASGGKQLELVYKMVNARFLDDRIPMHSLERTSWWCGTSDWVIPDLWVEVPESYAVKAKKDEILEKDGKFYRTLRITPGAGVNAKWTSRICSQCGGNAMELIEKAREEKVKTVTLDANGEVTLFGRTLRLYKRPSEERSREARRRNERAPWTEPRADVRLSLDDFRRAVAENMRRQPKSLQSRDTSQSRYFCVFTDCRCHNKEQHADINAAVNIGRRFLESLLRE

SEQ ID NO: 45 - protein, 1262 aa, Unknown
  source: /note="Description of Unknown: cas12c sequence"
MRRQHHGGQNARDWRRKVAAAALRQKESVFTYKFGLSVNDGDFDFDAAARTYDITEGIERGSLIGLVCAVHLSGFRLFSKVAETRQFLNRSRYPENEFAQALAAHTEIENPSVTVQSIESVFVTPPRKQDGVARLWSADELAKRLFQTWNNRSPREGERNHPELLLAQGIARAVTKAFSGWKELADNAVHALTCADNYLATLGNRFPKLSDLPPLTAGSTQTGTLAFDPESPFLNMTGNEDIWLHQVVAVCAGRLKRYMPEIDPSSRKFASRLTDSIVSSQNNGLSWLFGNGLRFLRQSSIAQIAETLSVSQNEHRRVEQLKEFADAIPVNPFFATDGYAEFRGSVGGKISSWVSNYWKRICELTVLHSQPPDITIPEGLLASENATLFSGQHTAAAGLVALSARLPSQVRDAGKALFVLSGDGVPRADDIATVEDVAGELAELTGQLAMLDNRIQQEIERAQDANDEGRVGSLASLRPNPTKELKEPPKLNRISGGTADAAGELARLETSLNDLIRARREHFYRLAEWTGNTASLDPLPALAERERKALTDRGMDPTLAEADEYALRRLLHRIAGMARRLSPNEAKRVRETMTPLFLKKREANLYFHNRAGALYRHPFSNSRHQPYSIDLNRARATDWLAWLEERAREMLGLLGSGAPANHEYLRDLLSIETFVFTTRLSGLPAQVPGYLAKPKSDLTNIPPLLAAQLDVDEVSRDVALRAFNLFNSAINGLSFRAFRDSFIVRTKFLRLGHDELFYVPKARAWKPPADYRSAKGKISKGLALPAVKRNEAGSILPRETTQGLSRAKFPEGSHALLSQAPHDWFVELDLRHDKMPQLAGLPVKMNADGLKGWRARRRPTFRLAGPPSFKTWLDRALTSTAVKLGDYTLILDQSFKQSLRVEDGEVRLSAEPAGIKAEIAVPVIDARPFPETEAEALFDNIIGIDLGERRIGYAVFSLPALLKSGNPTRVKPTVVGSVAIPAFRRLMAAVRRHRGSRQPNQKVSQTYSTALQQFRENVVGDVCNRIDTLCERYRAFPVLESSVANFETGANQLKLIYGTVLRRYTFSNVDAHKSARSAYWYSANRWQHPYLFVREWNKAQRTFTGSAKPLAIYPGVTIHPAGTSQICHRCGRNALRALRNMPDRTIRVGKDGLIVLADSTIRLLERADYSDRELKTFKRRKQRPPLNMPVPEGARPRDQLERVLRRNMRQQPQSEMSPDTTQARFTCVYTDCGFEGHADENAAVNIGRRFLERIDIEASSRT

SEQ ID NO: 46 - protein, 1283 aa, Unknown
  source: /note="Description of Unknown: cas12c sequence"
MTHAKKIPFPVLKRSTLRKARQRIAAGSITAGERPFNSTVTRVVPVKDPVSDQVWAVAREAAMTLRGFGQGSLFDMLIHLHADGFRLFPSGREREAFFLKDLFDPTEFDDGARRAFGDVMPGFTANSLREILGAPARKCGKVTSVEILLPRLSKGLGVKKSAAPPEVLSSLAAALCEAFPTWSLLTAVDGGVGKVIDDVLRTHGSRLPSLEKAWSTNLPEVPKGLGVPTLAFDDQAPAQSEQTPTGRFAGVVARYLAETFASNPEATAGDASKAVQAKVTTPNGNALSWLFAVGRRAMCSTTLDELAIGLNITSPRGRHALSSLKERMMALPALSVLGERAYPDSRATLQGTVDSLIANYVNRLFELSSSATSIAQTKLILPAAIQGDTAVFDGMPFSAEDVGALFEQLPSEIAKLEHAVKVLVGKERTSTLGYQKAVDDVDEFGVWASSVDAVIGQINARLKTLERAQEPLGKLMGDGKLKRLVNIHEPEGPAVEIIPVLDQELQDVLTSCRTAFADLEARYPMTVAKAQRHAEAEVRNALELASRKEGGLSLASADVPALAKRKILEPIISIARRSSPAMATAVLTECLRQKLIVKGTGSERSLRGYVLSGEQVIYAHPLSRRRSIVRLDREGLQNFDALEFLDALQKDATQRTNVRESLIVEMARQSLLLSALPDRIEIGAISWQTPSQNQHAPWANLRPVNGTVGRSETIKSFTAVFHSRISGLLYRLNRQKFMEKYDLRCFIGSTLLFSPKNADWAPPPQYRHGRFSALLARSDFPWEGAEGTHANAVRLAKFLIDETRNATDLQQAIAAKALLAQLPHDWVVCCDFDGAPSYEGAFVSAGEVSAWAKRSGYLLTPPRHFAGAFLEGFKSTKISPHGLTFERMLERDGDSVIETGRRVTAAFPITQEVAPAAQPWKPRHLAGLDLGEAGLGVCLKNLDNGHEQTLLLKTRKTRLLAHSAEHYRRKDQPRQVFRKQYNQSSENAIKAAIGEVCGLIDNLIARYDAVPVFESQAAAARGSNRMVARVYAGVLQRYTYVVGNGAADATRTSHWLGANRWSYSFGADVIPKVRDLSPEVLRSIKKPENVFRDALGFPGVLANAWRTSMICSVCGTDPIGALEEAIAANQISFVTDNEGEGSLDLGDGRKVTLRVEVPTSSALTKREASRRKRRAPWEAKVGTVWTLTRKSHRDDLLTTIRRSLRRPSSTFQGSTTKQWEFHCPCCGQIQQADVNAASNLVRRYFVRASDNARARQHWADDSKRLAFIASMGPDRSAREEKVS

SEQ ID NO: 47 - protein, 1125 aa, Unknown
  source: /note="Description of Unknown: cas12d sequence"
MRKKLFKGYILHNKRLVYTGKAAIRSIKYPLVAPNKTALNNLSEKIIYDYEHLFGPLNVASYARNSNRYSLVDFWIDSLRAGVIWQSKSTSLIDLISKLEGSKSPSEKIFEQIDFELKNKLDKEQFKDIILLNTGIRSSSNVRSLRGRFLKCFKEEFRDTEEVIACVDKWSKDLIVEGKSILVSKQFLYWEEEFGIKIFPHFKDNHDLPKLTFFVEPSLEFSPHLPLANCLERLKKFDISRESLLGLDNNFSAFSNYFNELFNLLSRGEIKKIVTAVLAVSKSWENEPELEKRLHFLSEKAKLLGYPKLTSSWADYRMIIGGKIKSWHSNYTEQLIKVREDLKKHQIALDKLQEDLKKVVDSSLREQIEAQREALLPLLDTMLKEKDFSDDLELYRFILSDFKSLLNGSYQRYIQTEEERKEDRDVTKKYKDLYSNLRNIPRFFGESKKEQFNKFINKSLPTIDVGLKILEDIRNALETVSVRKPPSITEEYVTKQLEKLSRKYKINAFNSNRFKQITEQVLRKYNNGELPKISEVFYRYPRESHVAIRILPVKISNPRKDISYLLDKYQISPDWKNSNPGEVVDLIEIYKLTLGWLLSCNKDFSMDFSSYDLKLFPEAASLIKNFGSCLSGYYLSKMIFNCITSEIKGMITLYTRDKFVVRYVTQMIGSNQKFPLLCLVGEKQTKNFSRNWGVLIEEKGDLGEEKNQEKCLIFKDKTDFAKAKEVEIFKNNIWRIRTSKYQIQFLNRLFKKTKEWDLMNLVLSEPSLVLEEEWGVSWDKDKLLPLLKKEKSCEERLYYSLPLNLVPATDYKEQSAEIEQRNTYLGLDVGEFGVAYAVVRIVRDRIELLSWGFLKDPALRKIRERVQDMKKKQVMAVFSSSSTAVARVREMAIHSLRNQIHSIALAYKAKIIYEISISNFETGGNRMAKIYRSIKVSDVYRESGADTLVSEMIWGKKNKQMGNHISSYATSYTCCNCARTPFELVIDNDKEYEKGGDEFIFNVGDEKKVRGFLQKSLLGKTIKGKEVLKSIKEYARPPIREVLLEGEDVEQLLKRRGNSYIYRCPFCGYKTDADIQAALNIACRGYISDNAKDAVKEGERKLDYILEVRKLWEKNGAVLRSAKFL

SEQ ID NO: 48 - protein, 1183 aa, Unknown
  source: /note="Description of Unknown: cas13a sequence"
MPIVKKFGRSQTSLSDRKIVLKMETAARNIPDFLLSDPEAVIGQWASAMDKIAKKPKGKDKPSSYQRKFRERLGKAIWADLTGPEGPLRDVPAAELEDLRKRWDRRVHPYPDGTKDGPKPATPKGRLYTRFAGEVGYGKADAVAIARDIRIHLLETEFKTGGGTRDAGRAVRRASSIEKNVLKKARVPQRPKPPQEAAWSKEDEDRYFIPHDVARKIVLAAKAQEKEDHRVAWRTAAAVLFEHFGRIFQQDGRALSFAEAEKQMPGLLALHRAVEGYYRQALKRHRKDRREHEARPGREKGTGRRKVSAILPKDKTALLALIGHQHQNREIAALIRLGRILHYEAGRRGNSDMVANINRNWPADVSESHYWTSAGQIEIKRNEAFVRIWRSALSHANRTLGDWLSPDEVANDITMSWESKHEKSGKRKTGKLEENREEAEAHAPVIFGGSAERLGTGDDFQKTLEAICEVFSQLRHSSFHFRGLDGFKDALTKTVKTCDPGAVARLQDLHAEDQANREARLKEDLRGAHAELFLDEGRLAEIWALLHPKSTEKTLPPLPRYSRVVTRAENTCNGLKLPKSVNRESMKVPAIHCRYILTRLLYQSGFRTWIAEAPAAQLNRWIETATERAQKATVGITKNEADRARMVGQIKVPEGQGIRRFLDDLAGLTATEFRVQAGYESDREAARDQAAFLENLNCDVMALAFDKYLSDHKLGWLAGIDAESRPSETPLSNVDELPSSGSLGTPERWEAALYAVCHLIPVSEVGRLLHQLRRWSNGQKATPDGGRLERLFELYLDMHDAKFDGSTPLRDHDDLAVIFETTGIRDRVLPSSLQHGEHERLPLRGLREMLRFGNLRVLAPIFATAKVDQAMIGELEGLEARIGDAPSQVDRAQALRTEMHAALCKKRKLAHDDKKSVKDYLTSLQTVIRHRRLANHVRLTNHVRTNEILMSVMGRLADFSGIWERDLYFVTNALLYQAGLTPCDVFSKEPPKENRRSPLQEFENGQIVFALRKMQAQCDTHAGLVDQIKGETARLFHIAEGAPGNDPRIQNRNWFAHFNALKPKTGDRLDLTADMNRARDLMAYDRKLKNAVVSAIVTLLERENIVIAWTMKDHQLTDAVLAAKSIEHLKQNKIRENLRDERSLGYVAALFGGRVAEEAPDIMHDRTVFHLVGALTEEMEPAE

SEQ ID NO: 49 - protein, 1276 aa, Unknown
  source: /note="Description of Unknown: cas13a sequence"
MRIVRPYGESRTDLGGERGQTRVLVDNTAARARHEIPDFAQSHDALVIAQWISVLDRIATKPQGTQGATRAQHAFRDRLGRAAWAQMCAADRISAAAQADPYVAALWRFKTHPYGDAKYRPRKGKDGKPLGEPKPQGRWYGRFAANAEPEQADVAAIAALMDHHLHVAELRIDPKRPEKRKGLIEARAKSIEGNVLVAEPRKRPVGSWSREAITRYFMRQDVAAEIFAAARDREQGLNDVPRGPVRLALAAKILHGHWTRLFHAPGTRTAYSIREAEEKEPELFALHMAVKDAYAKLLKRRTQPKTLKKGVKPPQQAPVTTVLPKNAGELLRLVQHRSRNRDLSALIRRGKLIHYTAFDIAAAAAEAESKTPDVPDADRLAYVLTHWPDDLSASRYLTSDGQSAIKRSEAFVRVWRHTIAMASLTLRDWASMNNDLGDVLGSANKVDQAIGRANFDPAWHDKKVRLLFGARAALFPSDDDGRKALLASVIRAGLALRNSSFHFTGRGGFLAALKKLGSEEVMVPSILAAAHALWREDATARAGRLRAALTGAHAAHYFEEDQNASILTLLDEAPPKESLPIPRFRRVLGRAENTWKGKEALVLPPTANRRQLEDPARRCRYTILKALYERPFRSWLIARAPEEVNAWIDRAIERTTRAAKDMNAKRGEDDKRSVIAAKAESLPRLSGERGIGDFFFDLSSATASEMRVQRGYGHDGEAAKEQAGYIDDLLCDVVALAFDAWLRNPQANGRPLTFICDLKPETPLPAAPKCTLQEIGSAAEPVRPEDWQAALYLLLHLVPVGEAGRLLHQLAKWTVTSRLADDLLNANVTDDPSKAERTADEEDLKRLVHTLIQHLDMHDAKFEGGDALTGCEPFAALFASRPGFARIFPAEADERLDRRVPKRGLREIMRFGHHGLVASFAEDTRITDKEVGDYLRLEIEERPDNVAALQARKEEAHERWVKAKEKRKTVDPKHLEDYVTALCGIARHRRLASRVTLTDQVQVHRLLMTVLGRLVDFSGMFERDLYFAMLGLLDEKGARPDEVFSGPIDEPKSRLALLANGRVLAALREQIPHSKDLAEELRKDLERLFGMDCSGIRLLEADERGDTCLRDIRNDLSHFNLLHDDSFALDLTTLVNRTRGLMSYDRKLKNAVSKSIKELLAREGLTLSWDMTDRHDLENARIGAKPAVHLGGRKLAFRGGDRRPEPVRENLHSPTHLEAVARLFGGKVVEEDDVTNLDLSSIDWAAEPHNSKETHRHRPAGPRKSPPKRRAYHAPR

SEQ ID NO: 50 - protein, 1225 aa, Unknown
  source: /note="Description of Unknown: cas13a sequence"
MRIIKPYGRTLVEHDGAGERKRVLTLRPDHDSKLDIEAFARDHDELVVAQWVSTIDKIAAKPGPRKGATEEQRAFRDRIGKAAWALLVRNALLPGLADADRADRLAKIWRRKIAPYGDLRPNERPASAKGRWYGAFAGEADVADVDAGEIAAKIHEHLYDAEYRISGDGRKPDGCIAARARSIAVNVLRPADSSACGQPEWSDRDLQAYRVADVAKQIWDAALSRENGRDGAGTKRVTNSVAGGVLFEHWARIFPGPDGKALSIREAIEKEPGLFALHMAVKDCYARILKHHKKKAPGRRERENGDVSPIRKVLPRDMDELFARIISGRGNRDLNALVRLGKVIHYTASDPNADHPESITENWPGDLAGSHYWTSAGQAEIKRNEAFVRVWRHVVVLAARTLTDWGDPHGEIGSDILGKANDATGAKFDEAAFNRKCALLFGKRASHFTAAPDLAFKKAVLKTAIKGMAALRHKSFHFAGRGGFVKALEGIGGLNEIDRFPDVTRALRTLLVEDIEDQSRQVRATMVGAHFGVYLSKGQVEAIYRAVTGAEPGSLPLPRFSRVLRRAKGAWEAEDVLPPPVNRLDLEQRGRLCQYTGLKLLYERPFRRWLEGRSAAKLNGFIYRAVTRASDAARTLNTKESDDWRDIIVARAEKLGKVPDGGDIHGFFFELSAETASEMRVQQAYESDGERARQQAEYIEDLKCDVVGLAYRSFLETEGFDFLRTLDPEAAIAEAHRFDPAELPDPAVDTDAEDWEAVLYFLVHLVPVDEIGRLLHQMRKWDLLAHDRTAPVADGGQARLVDKVQRVFTLYLDLHDAKFEGGEALTGIEPFRKLFEESDGFDTIFPPQQGYEEDRRVPLRGLREIMRFGDLPPLLSIYGRRPATKSNIERYRRAEVADAGGRSEIARLQARREELHAKWVEAKKEGLGPEDRRAYVEALAEIVRHRHLAAHVTLTNHVRLHRLMMAVLGRLADFSGLWERDLYFATLALLHRAGKTPREVFENEGIDLLRNGQIVYALRKLNGSSNASALRSGLFPHFGSAFKRGDPIGGIRNAFAHFNMLRAAQPPNLTECINRARQLMKHDRKLKNAVSKSVIDLLAREGLNIAWAVHTRAGAHDLAEAVLSSRQAQHLGKLRLFPVSGDGRDGKGFFIMEDLHGADFVEMAAELFGGRVSDRWRGKGCVSELRLDSIDWSRQREQKKHGGGKKPTGRARKANRGHKNRHRRA

SEQ ID NO: 51 - protein, 1076 aa, Unknown
  source: /note="Description of Unknown: cas12f sequence"
MSARNIKVKIDTKGNPELRLGLWKTHQVTNEGVKYYTEWLIKLRQQDIYRQSREDASPRVIISASDLKADLLCHARQLQKERLPRITGSDAEILGTLRQVYELIVPSSVGKSGDSKTLARKFLSPLTDPGSAGGRDQSASGRKPTWMKMKSEGNPRWEETFRKWKDRKDNDPTPLVLNQIADYGLLPLIPLFTDVGENIFDPKSKSQFVRTWDRSMFQQAIERLMSWESWNQRVRREWEALNQKHSAFYREQFTADPDAALYRVAQSLEEEMRKEHQGFASDAPEAFRIRRVALKGFDRLLERWQKTLGKNGQSATLLDDIRRVQSDLGDKFGSAPLYQKLLDERWQRLWAVDPTFLQRYAAFNDLTQRLQRAKRVANLTLPDAVAHPIWSRYEGANASSGNRYHIHLPTKGQPGSVTFDRILWPDGNGGWYERKRVTVFLRPSHQVDRIHEAPTDSVVDNFPLVVEDQSARTILRASWGGAKLEYDRNRLPRQLKKGVPDSIYLSLTLNLDTNKPSGLFHTQQNGRVWIRKDVLMQYYNETPGDNVQFKPLYVMSVDLGIRSAAAVSIFSVQLKAGIEEHRLTYPVADCPGLVAVHERSVLLTMPGERREQWDRRYEQQRQGLRELRTDMRGMNDLLRGAYMDGDRREEFLARLSKLEETSPELWGPVYRSLNDSKVASATEWERLVVYCHRQVEQSLSSRIQNLRSGRSAYRMSGGLSLDHVQDLERIRGIIASWTNHPRIPGSVVRWQQGRSHTVALGRHILELKRDRVKKVANYLIMTTLGYAYDSKRARGEKWVRRYPACHLMVFEDLTRYRFRTDRPRSENRQLMRWTHQELIAVTGIQAEPHGISVGTMYAGFSSRFDAVTKAPGVRGATVRQILRTRGMVRLKEIAADVGIDINTLRPHDVLPTGDGEYLLSVVRHGESYRLKQVHADINAAHNLQRRLWTQDEVFRVSCRLALNSGRVVAMPPPSYNKRYGKGFFEKGDNGVYIWKTGGKIKISDTLEEDMDIPEDTAELLRGNSVTLFRDPSGTIAGGNWLEAKEFWGRVNSLVNKGVRDKILGGIPVDNSSAHAE

SEQ ID NO: 52 - protein, 660 aa, Unknown
  source: /note="Description of Unknown: cas12f sequence"
MPMIKITECVTWGTTCDGLWDARPHLEVRRSWSPPVQGGRTNRLDAPPASVTLNIHGRVEHPRDADALSVAPLRVRHMFERTTTKAAFLSPLDLRPTQATDLERFAGTTRWAFNWANALLEAHHQAYEGRRQQAARHLFGLGPEQLDELRVLANGTRDENGKKAKGDPVKRREYESIQKATKKAVSEENKALGAEMKLWDEHRSLVVHKGRPLLTPGDEPALDAPPLAHRLYARRVELAGIQKTDPDYYAEQRKKEREAITPNVVAMKRDLMAKGAYFPSEYDLQYIWRTVRDLPKEEGGSPWWPECPTILFYDGINRARTAWKNWMDSASGARKGPPVGMPRFKSKYKAKDTFTITNPNRSVIKFETYRRIAITGIGSMRLHRGAKLLARRIAAGQAEITSATISRSGTAWYVSVLCTVHTTARTAPSKAQRSRGAVGVDWGVRALATTSKPIALTPGKPASRTVPAEKYGAAMSQKIARAQRQLARMPKGSSRRRKAARHVADLQHLVAQRRASSVHQLSKALAQSFEIVAIEGLNVRGMTKSAKGTVENPGKNIRQKAGLNRAILDATPGELKRQLEYKTKKYGSRLVELDTWYPSSKTCSRCGWVHPKLKLSMRTFRCQQCGLVEDRDFNAAVNIERQGITHIVKENEGTDDREEG

SEQ ID NO: 53 - protein, 696 aa, Unknown
  source: /note="Description of Unknown: cas12f sequence"
MSTPMGWTAVNGGDATSPTTRVSSPPGEPRTGACPRAAAADATRAESSPRRTSSPARPGERHARARTSRYPIPNTYVVDRPSAEGDRHGQSSLDCGPCPVRRSGALHQSSQAAHRRSMTGAKQKTPIRVVRFSIDHSALTPAQVVAFARHAGAARQTWNWALGRWMDWRNNTKFYVDYKVFKAAGMGPGLSTDDLIQVIERAVSIRQDDKWMDAAWDEARQIHGEWDQFQKASTLQSLYLAGAQEPFDPSRDDGINPYHWWVTEGDKSGLPKAERHNVNSGATYTAPLRAFEEAVGRFYKLPGKKGTPKFKSKHDDEQGFCIQRLTETGLSPWRAIEGGHRIKVPSIGSIRVVQSTKRLRQLIKRGGKTTSARFTRRGGKWFVSVSVAFDLSAPRVQRPARLSRRQRAGGSTGVDLGVNRLATLSSGDQFPNRRLLRKSMAEIKRLQRKFDRQHRAGSPECFNEDGTHKKRCRWGREDGPAMSRSAQTTKRQLRRIHDLTARRRAGVLHEITKDLATRFELIGVEDLNVAGMTAKSKPKPDPDRPGHFLPNRRAAKAGLNRAILDVGFYEFKRQLGYKTEWYGSTMQMVHRYAATSKTCSGCGWVKPKLTLAERTFNCTQCGLAMDRDHNAAVNIRALALEGAAPMEREQPAPVGAAEKRHRDPVSHRRRPKSLAPCESTRPVRDLSPPATQEETA

SEQ ID NO: 54 - protein, 606 aa, Unknown
  source: /note="Description of Unknown: cas12f sequence"
MAQAEAPRRLRAYKFALDPTEAQLREFEQHAGSARWAYNHANAILSRYSDTLRNRWNAWIAQHHGLSREQLYALPDRERTAIQAAARAAVKAENAQLAAELRIIDDHRKRVTHKGKPSVEPGEQPAEDAPERAYQLWRERVELARLHAEDPQAYRAERKRILDEIRPLVNATKRKLIEQGAYRPTAMDISTLWREIRDLPPDEGGSPWWPEVSIYAFTSGFAHAETAWKNYLESLAGRRAGRPVGKPRFKKKRRSRRSFTLYGSVKLVTYRRIQVPSIGSVRLHGSAKRLHRALERRGGIIKSITISQGGHRWYASVLVDELDITPGRETQRGPSRRQRDRGAVGVDLGVHHLVALSDPNEKTLDNPRHLRKARKRLLKAQRAMSRRRGPDKRTGQEPSRRWVKARNRVARLHHELAVRRAGHLHEITKRLATSYELVAIEDLNVAGMTRSARGTIDQPGRGVRAKAGLNRSILDTSPAEFRRQLQYKASWYGATVAVIDRWAPTSRTCSSCGAVKAKLSLAERTFFCEHCGMELDRDINAARNILAFAQSAYPGEGKALNACGGSVSPGSQSVVQAGADEAGRPARKPRRSSRGSDPPATPTTRA

SEQ ID NO: 55 - protein, 1421 aa, Unknown
  source: /note="Description of Unknown: cas12a sequence"
MTSSSPTQRAYTLRLKSAAQGDKSWAEKLWDTHEIVNKGARAFGDWLLTLRGGISHKLENLNDKETGEEGKKRRRILLALSWLSVESKDFAPEKYIVEKDGEDKHRTKEALEAILKSRNLEDEEVESWVNDCKDSLTSSIRDDAVWVNRSRAFDDAVRKIGDSLTREEIWDVLGRFFGKKEAYLAPRTIDEKNGKTKKEEPKDLARKAGGWLSKRFGKGKGTDFSKLSKVYSEIVKWAEEPRKSEPRTLANLASALKEDSLQGILNLIKNSGSKSGTRNFLEEIGEGEVSKENLAILKAKAEGNRNYCKKEIGGKGRREWSDRILKSIEETLDGKFTYLQEKGPARHWEFAVMLDHAARRISAGHTWIKLAEARRRNFEEDSQKINEVPENARQWLETYREDRSKSSGAIEGYLISKRAVTEWETVVKAWKNCKTEEDRIAAAGALQDNLGIDQFGDINLFRALASEDVRCVWQVDGKPDANILLNYVAATKAEFDKRRFKVPAYRHPDPLLHPVFCDYGNSRWEIRFDVHEVNRTGKKAKQNKKTIETADVHGLKMDLWTGSKIENVSLRWQSKLLEKDLAVKQLDGKEDGKKEVSRASRLGRAAVGAGWETPVSASSVFAQKHWNGRLQASRKELSRIARRVKTRGWDEKANSMKKNLKWFITFSPKLKLQGPWISYVDNSEDKRPFTFTSKGEPILDEVFSIENKNRKGRARLILSRLPGLRVLSMDLGHRHAAACAVWETLSSRQLEDACAEGGYDKPAPDAMYHHIKSNRGKRVIYRRIGADELSDDSIHPTPWARLERQFLIKLQGEERKARMATADEIWEVHELERALGRKTPLVDRLTKSGWGSDSGTPRQRQLLGELNQWGWEPDEAQENSEDDEITSRESLLVDKLMSRTVDTVRKGLRRHGNRARIANFLVAREKTVPGGQMDTLNNEGRKEIIADALAFWYELANGGEWKDTEALDWWKIHIEPELSVEELPDIAGTGIAPKERKRKKKELKEKLKPVAERLLTSGAKKLSDQWCERWKQDDKEWQKTLRWLRDWILPRGVRGKSELIRNVGGLSLDRLTTIQSLYQAQKAYFTRITPKGIQMDKDKPLTAVMNFGGHILNDLENMREQRVKQLASRIVEAALGVGRVKIPKKSKDPKRHYERVDAPCHAVVIENLTNYRPEETRTRRENRQLMTWCSGKVKKYLSESCSLHGLFLWEVPPSYTSRQDSRTGSPGIRCEEVSVEKFFKTPFRQREVARAEEKDSKNKASAYEQYLIDLKERWKSRGEETALLRIPRKGGEIFVSANSNSPASKGLQADLNAAANIGLKAITDPDWSGSWWYVPCSSKDFVPIKDKIGGSRAFENITTPMPNPDDAKEATGKKRSGKKEIINLWRNPACSPLERDEWERTAKYWNMVEYHVIKRLKRQMG

SEQ ID NO: 56 - protein, 1333 aa, Unknown
  source: /note="Description of Unknown: cas12a sequence"
MKNFQDFTNLYELSKTLRFELKPIWGTKKLIEEKNILKLDKKKRENYEKVKPYFNKIHQEFINFALRNPNFDFSQFEEKYLNWLKDKKNKDLLKEKESIDKIFLEKIWKLFENSVKDFLKENGFESIVKSEDQNLKFFRRKEIFEVLQEKYGSELETQMVNKDWEIKSIFNGWEKWLWYFDKFFNTRDNFYKTDWTSTAIATRIIKDNLKIFLENTIIFEKVKNKKIDFSEVEKNFSVSIDTFFEINNFNNCFLQDWIDFYNKVIWGETLENWEKLKWLNEIINKYRQDTGEKIPYFKKLQKQILSEKDWVFIDKIEDDGGFYEVLKNFYKNAAEKEWFLKNIFENFYTISDKNLEKIYFNKIAFNTISHKFWSALEFERILYEEMKKEKADWIKFEKKENKYKFPDFIQIIFIKRSLENYDSENLFWKERYYKSEENVDWFLEKNNNNIWEQFCKILNFEFLNILKRRIIDEAWEEYEVWFEISKNILWEKLENFELNQENKWIIKDFADYSLALYSFWKYFAVEKWRNWDLNIDISDDFYGWEDWYIEKFYNTGYDEIVKPYNLMRNYISKKPWEDSKKWKINFETSSLLSWWDKNLESNWSYIFQKWNKYYIWIINWSKPAKEVLEKLYSWNGEKIKRFIYDFQKPDNKNTPRMFIRSKKDSFSPAVGKYNLPVEDILEIYDNWLFKTENKDNSNYKESLSKLIDYFKLGFSKHESFKHFNFVWKDSKEYENIADFYRDVEKSCYQITSEFLDFEELKKLTFKKHLYLFQIYNKDFELDESLQKNWYNFRDEWQKNIHTKYFEALFLEENILRKSWAVFKLSWGWEVFFRKESIKAEKEKRKNIEVTKNRRYTEEKYFLHFPIQVNFKNEISWNFNQEINKFLANNPDINVIWIDRWEKHLAYFSVINQKWEILESWSFNKIENYNKNWEKLLFPEREIKEIHKDWSLIDLELVETWRKVDYVDYKLLLEYKERKRLLQRQSWKEVEQIKDLKKWYISALVRKIADLIIKHNAIVIFEDLNFRFKQIRGWIEKSIYQQLEKALIDKLNFLVNKNEINLEKAGSILKAYQLTVPVDSLKEIWKQTWVIFYTEAAYTSKIDPIKWWRPNLYLKKQNAEINKENILKFDNIIFNSKENRFEFTYDLKKFFWKDSKFPAKTVNTVCSCVERFKWNRNLNNNKWGYIHYENLTDWKLANKEQKEDEFSNFKELFEKYFIDINWNILEQIKNLDTKNNEKFFSSFIDLFTLVCQIRNTNQNAKWDENDFILSPVEPFFDSRKSQNFWKSLPKNWDENWAFNIARKGLIILNRISENPEKPDLLIFNADWDNFARNI

SEQ ID NO: 57 - protein, 1175 aa, Unknown
  source: /note="Description of Unknown: cas13b sequence"
MTEQNEKPYNGTYYTLEDKHFWAAFFNLARHNAYITLAHIDRQLAYSKADITNDEDILFFKGQWKNLDNDLERKARLRSLILKHFSFLEGAAYGKKLFESQSSGNKSSKKKELTKKEKEELQANALSLDNLKSILFDFLQKLKDFRNYYSHYRHPESSELPLFDGNMLQRLYNVFDVSVQRVKRDHEHNDKVDPHRHFNHLVRKGKKDKYGNNDNPFFKHHFVDREEKVTEAGLLFFVSLFLEKRDAIWMQKKIRGFKGGTEAYQQMTNEVFCRSRISLPKLKLESLRTDDWMLLDMLNELVRCPKSLYDRLREEDRARFRVPVDILSDEDDTDGTEEDPFKNTLVRHQDRFPYFALRYFDLKKVFTSLRFHIDLGTYHFAIYKKNIGEQPEDRHLTRNLYGFGRIQDFAEEHRPEEWKRLVRDLDYFETGDKPYITQTTPHYHIEKGKIGLRFVPEGQLLWPSPEVGATRTGRSKYAQDKRFTAEAFLSVHELMPMMFYYFLLREKYSEEASAEKVQGRIKRVIEDVYAVYDAFARDEINTRDELDACLADKGIRRGHLPRQMIAILSQEHKDMEEKVRKKLQEMIADTDHRLDMLDRQTDRKIRIGRKNAGLPKSGVIADWLVRDMMRFQPVAKDTSGKPLNNSKANSTEYRMLQRALALFGGEKERLTPYFRQMNLTGGNNPHPFLHETRWESHTNILSFYRSYLKARKAFLQSIGRSDREENHRFLLLKEPKTDRQTLVAGWKSEFHLPRGIFTEAVRDCLIEMGYDEVGSYKEVGFMAKAVPLYFERACKDRVQPFYDYPFNVGNSLKPKKGRFLSKEKRAEEWESGKERFRDLEAWSHSAARRIEDAFVGIEYASWENKKKIEQLLQDLSLWETFESKLKVKADKINIAKLKKEILEAKEHPYHDFKSWQKFERELRLVKNQDIITWMMCRDLMEENKVEGLDTGTLYLKDIRTDVQEQGSLNVLNHVKPMRLPVVVYRADSRGHVHKEEAPLATVYIEERDTKLLKQGNFKSFVKDRRLNGLFSFVDTGALAMEQYPISKLRVEYELAKYQTARVCAFEQTLELEESLLTRYPHLPDESFREMLESWSDPLLDKWPDLQREVRLLIAVRNAFSHNQYPMYDETIFSSIRKYDPSSLDAIEERMGLNIAHRLSEEVKLAKEMVERIIQA

SEQ ID NO: 58 - protein, 1115 aa, Unknown
  source: /note="Description of Unknown: cas13b sequence"
MESIKNSQKSTGKTLQKDPPYFGLYLNMALLNVRKVENHIRKWLGDVALLPEKSGFHSLLTTDNLSSAKWTRFYYKSRKFLPFLEMFDSDKKSYENRRETTECLDTIDRQKISSLLKEVYGKLQDIRNAFSHYHIDDQSVKHTALIISSEMHRFIENAYSFALQKTRARFTGVFVETDFLQAEEKGDNKKFFAIGGNEGIKLKDNALIFLICLFLDREEAFKFLSRATGFKSTKEKGFLAVRETFCALCCRQPHERLLSVNPREALLMDMLNELNRCPDILFEMLDEKDQKSFLPLLGEEEQAHILENSLNDELCEAIDDPFEMIASLSKRVRYKNRFPYLMLRYIEEKNLLPFIRFRIDLGCLELASYPKKMGEENNYERSVTDHAMAFGRLTDFHNEDAVLQQITKGITDEVRFSLYAPRYAIYNNKIGFVRTGGSDKISFPTLKKKGGEGHCVAYTLQNTKSFGFISIYDLRKILLLSFLDKDKAKNIVSGLLEQCEKHWKDLSENLFDAIRTELQKEFPVPLIRYTLPRSKGGKLVSSKLADKQEKYESEFERRKEKLTEILSEKDFDLSQIPRRMIDEWLNVLPTSREKKLKGYVETLKLDCRERLRVFEKREKGEHPVPPRIGEMATDLAKDIIRMVIDQGVKQRITSAYYSEIQRCLAQYAGDDNRRHLDSIIRELRLKDTKNGHPFLGKVLRPGLGHTEKLYQRYFEEKKEWLEATFYPAASPKRVPRFVNPPTGKQKELPLIIRNLMKERPEWRDWKQRKNSHPIDLPSQLFENEICRLLKDKIGKEPSGKLKWNEMFKLYWDKEFPNGMQRFYRCKRRVEVFDKVVEYEYSEEGGNYKKYYEALIDEVVRQKISSSKEKSKLQVEDLTLSVRRVFKRAINEKEYQLRLLCEDDRLLFMAVRDLYDWKEAQLDLDKIDNMLGEPVSVSQVIQLEGGQPDAVIKAECKLKDVSKLMRYCYDGRVKGLMPYFANHEATQEQVEMELRHYEDHRRRVFNWVFALEKSVLKNEKLRRFYEESQGGCEHRRCIDALRKASLVSEEEYEFLVHIRNKSAHNQFPDLEIGKLPPNVTSGFCECIWSKYKAIICRIIPFIDPERRFFGKLLEQK

SEQ ID NO: 59 - protein, 1115 aa, Unknown
  source: /note="Description of Unknown: cas13b sequence"
MESIKNSQKSTGKTLQKDPPYFGLYLNMALLNVRKVENHIRKWLGDVALLPEKSGFHSLLTTDNLSSAKWTRFYYKSRKFLPFLEMFDSDKKSYENRRETAECLDTIDRQKISSLLKEVYGKLQDIRNAFSHYHIDDQSVKHTALIISSEMHRFIENAYSFALQKTRARFTGVFVETDFLQAEEKGDNKKFFAIGGNEGIKLKDNALIFLICLFLDREEAFKFLSRATGFKSTKEKGFLAVRETFCALCCRQPHERLLSVNPREALLMDMLNELNRCPDILFEMLDEKDQKSFLPLLGEEEQAHILENSLNDELCEAIDDPFEMIASLSKRVRYKNRFPYLMLRYIEEKNLLPFIRFRIDLGCLELASYPKKMGEENNYERSVTDHAMAFGRLTDFHNEDAVLQQITKGITDEVRFSLYAPRYAIYNNKIGFVRTSGSDKISFPTLKKKGGEGHCVAYTLQNTKSFGFISIYDLRKILLLSFLDKDKAKNIVSGLLEQCEKHWKDLSENLFDAIRTELQKEFPVPLIRYTLPRSKGGKLVSSKLADKQEKYESEFERRKEKLTEILSEKDFDLSQIPRRMIDEWLNVLPTSREKKLKGYVETLKLDCRERLRVFEKREKGEHPLPPRIGEMATDLAKDIIRMVIDQGVKQRITSAYYSEIQRCLAQYAGDDNRRHLDSIIRELRLKDTKNGHPFLGKVLRPGLGHTEKLYQRYFEEKKEWLEATFYPAASPKRVPRFVNPPTGKQKELPLIIRNLMKERPEWRDWKQRKNSHPIDLPSQLFENEICRLLKDKIGKEPSGKLKWNEMFKLYWDKEFPNGMQRFYRCKRRVEVFDKVVEYEYSEEGGNYKKYYEALIDEVVRQKISSSKEKSKLQVEDLTLSVRRVFKRAINEKEYQLRLLCEDDRLLFMAVRDLYDWKEAQLDLDKIDNMLGEPVSVSQVIQLEGGQPDAVIKAECKLKDVSKLMRYCYDGRVKGLMPYFANHEATQEQVEMELRHYEDHRRRVFNWVFALEKSVLKNEKLRRFYEESQGGCEHRRCIDALRKASLVSEEEYEFLVHIRNKSAHNQFPDLEIGKLPPNVTSGFCECIWSKYKAIICRIIPFIDPERRFFGKLLEQK

SEQ ID NO: 60 - protein, 1008 aa, Unknown
  source: /note="Description of Unknown: cas13b sequence"
MDTPNFSERIPVSLQSHPYYFAHYLNMARHNAYVILEYVNRELIKPGKNLDEDNLIQSTVLKDGYFDRKPDELSHRNRLLVQHFPFLREAENEGARTCNPVSYKLKTALAALNQWRNNASHYPLNQNHEKDFDLQPFFSFAIEACKKRMREVFQPDDFYLLETNEKQFYTLHNENGFTEKGLYCFICFFLEKKYAFQFLAGIKGFKNTTDNKFRATLETFTEHCCRLPKPKLDSSDIKLDMLGELSRCPAPLFDLLDIEERKKFIREPEEVKPDESGDREEVQQVLMKRYDDRFPYFALRYFEEKNLLKGISFHIHIGRWIKSEHTKKIMGAERDRRLLKDIRTFGELKEFSPEHAPDYWLRDGITPDDVDQFSPQYRIVGNRIGIKLNYNGHNRWSVPDKEINVKPDAIISTYEFLNLFLYEHLYQKKLTGLSPAEFIQDYLDRFNNFLSEFKAGHIRPVGDFSLEKRRGQGDEPDLTARRKSLQKELDRFVLKGKDLPDKIREYLLGYKQKSEKKQAKWILGGMIKETVYWRNKAEQSPEKMRSGDMAQQLARDIIFLTPPHTVKEHKQKLNSLEYDVLQYALAYFSSNREKLYSFFKEHQLTVKGDRAHPFLYKIRLDECQGILDFFIVYMQQKEKWLGWLDRNLKSPRLNEEEFFNTYSYFIKTDTKRAIEMDYESCPNYLPRGIFNEPIAKALQKAGVKIKDEDNASYALSVYSNGKTQPFYNKERYYNKGIFRMEELPEKLQPKELLGKIQWTIKSSGKDTEEFRSLQNLKNRILNTEKEIRYVQSTDRALWIMVADLFPETFELRPDDLECIGHDLSDDLLSRPYQMKEKVYNYTITDYLPIKRYGEFRRFLKDRRLENLLTYFEEGVPLHREALVAELEAYDLQRKNLLEIIYRFEKLVFDRHRHELTFSGEGENQYVNHWDYLDFVARKYGLSAEVKELNSERFTELRNKMLHNQIPYQLWIKEAIAAREENTVCGRIMGMIGEIYERMTTEIEKQMQV

SEQ ID NO: 61 - protein, 1063 aa, Unknown
  source: /note="Description of Unknown: cas13b sequence"
MFDNEQKNLEKEPYWGVFLNQARLNAYIALRDISERLEENAADEDSLSEWPVLKYLDNDTDAVKSRRIFDLVEKHFSMLKIIYGGEKEGDLVKRSKEYKIILKCLFRALNFYRNKFCHMYSGNRARKYNEKELIKYLEDCFDASVRKIKELRRLDEKDVLHLRRKIAEGKDANKRVIDNPQFRYPFKNEKGELNEKGLYFLASIFLDKKEAHEFLKKQEYFKNDSEPKYRATLESFYHYRIKLPRPVIESDVDKNGLALDMLNELKKCPKELFDLLSKEQQEKFRVVDSEDADEEGNEILMRRYSDRFPYLALRYCDENQVFERIRFQIDLGRYYFKFYPKETIDGKTQQRSLDKRLKIFGRIKDVKSKVEQEWSGIIKSPDTIEENPNEPYKLKTTPRYNIVDNQIGFVITGDKNLPDVKRPDGRIELEKPDGWLSIYELPGMLFHGLKYGFDKTERMIKIYIEKQRKICKEICEKGTITPDDGESMPEALKGGAKAAKRNYSEKKLERMLQDTEQRIRAIQTTQKRMDEPGNKPGKKKFFDIRAGKLADFLARDIMALQRFDPAKHGKDKLTAINFQVLQATLAFYGAKKDVIEDMFKGIGLLEGDNPHPFLNQIDPAQYNSIAGFYQAYLQKKRSYLEDYRKEEEYDEQFLRPKRQRYAQEKREIKTVARQLLDNPVNVPKNFFKKEIEEFVFSQDPSLKKSKMNTAYMIQALFEKHYGRQQPFYSYNRTYPVVSKAIEYGKKGKNKKIAKVLMAIEPKLNYMEIKKIVNEMPDGQYEPENLKRNLYEGYKDYEKDERIIRRCKVQDVVSFMMVEETLKDQLDFNGNVLTLEKITPWEASPFKKPVLCHTIISIPFNTKGGHTDKDYVDFIKNNFEGSYDCEPNKIILKYKVTSKDTKLKDIGKYRMYSHDRRLPGLLIWKYRPNDQNGNEIKFTEIEQEIKAFERRRIEIAQCLYTLEKKVIDSWFTQDELGEEHIPFNKVIDVIKAKMPNFEDKCNVLLKIRNAINHNQFPVYEQAIQTAPGKEIAGKMLRITESYIEQIMAKIDPDFGRTEDAESSR

SEQ ID NO: 62 - protein, 1009 aa, Unknown
  source: /note="Description of Unknown: cas13b sequence"
  MOD_RES (375)..(375): Any amino acid
MDTPNFSERIPVSLQSHPYYFAHYLNMARHNAYVILEYVNRELIKPGKNLDEDNLIQSTVLKDGYFDRKPDELSHRNRLLVQHFPFLREAENEGARTCNPVSYKLKTALAALNQWRNNASHYPLNQNHEKDFDLQPFFSFAIEACKKRMREVFQPDDFYLLETNEKQFYTLHNENGFTEKGLYCFICFFLEKKYAFQFLAGIKGFKNTTDNKFRATLETFTEHCCRLPKPKLDSSDIKLDMLGELSRCPAPLFDLLDIEERKKFIREPEEVKPDESGDREEVQQVLMKRYDDRFPYFALRYFEEKNLLKGISFHIHIGRWIKSEHTKKIMGAERDRRLLKDIRTFGELKEFSPEHAPDYWLRDGITPDDVDQFSXPQYRIVGNRIGIKLNYNGHNRWSVPDKEINVKPDAIISTYEFLNLFLYEHLYQKKLTGLSPAEFIQDYLDRFNNFLSEFKAGHIRPVGDFSLEKRRGQGDEPDLTARRKSLQKELDRFVLKGKDLPDKIREYLLGYKQKSEKKQAKWILGGMIKETVYWRNKAEQSPEKMRSGDMAQQLARDIIFLTPPHTVKEHKQKLNSLEYDVLQYALAYFSSNREKLYSFFKEHQLTVKGDRAHPFLYKIRLDECQGILDFFIVYMQQKEKWLGWLDRNLKSPRLNEEEFFNTYSYFIKTDTKRAIEMDYESCPNYLPRGIFNEPIAKAVQKAGVKIKDEDNASYALSVYSNGKTQPFYNKERYYNKGIFRMEELPEKLQPKELLGKIQWTIKSSGKDTEEFRSLQNLKNRILNTEKEIRYVQSTDRALWIMVADLFPETFELRPDDLECIGHDLSDDLLSRPYQMKEKVYNYTITDYLPIKRYGEFRRFLKDRRLENLLTYFEEGVPLHREALVAELEAYDLQRKNLLEIIYRFEKLVFDRHRHELTFSGEGENQYVNHWDYLDFVARKYGLSAEVKELNSERFTELRNKMLHNQIPYQLWIKEAIAAREENTVCGRIMGMIGEIYERMTTEIEKQMQV

SEQ ID NO: 63 - protein, 1160 aa, Unknown
  source: /note="Description of Unknown: cas13b sequence"
MKTLGALSSHNYNNKKYYFSGLLNTAQYNFNLALQEVNDRLGKKGKNPGKTMIKNIFDQKDSFSTQERAMYYLEEFFPWIFLVMKQSGINIPTEEQETKLHKEEIQLIQEHLISLYELLDDLRNEQTHYMHDPVIIPEEVSKMLDALLLQILKNTRKKCKDDEYRTFIVKKYQEEFQKEIKVQVKDRFGKEKEKIVTGEVKENYVINRCFRKWIQKEGEEETLRYSTVQEEQGKYVWSSSGFVFFLSLFLRRKELEDVMNHVPYFKDSRKLLFYLTRKTFSSYCFRDLRKSLRSDYSNDSLLMQMIEELYKCPGELYEVLLKEQKQEFIEDINEYYKDNPEFEGSANEAQVIHPVIRKRYQDKFPYFALRFIDEYFNFPTLRFQLVLGEYVTDRRTKELQGTALFTDRVISQRISYVGKLSEAEMNKKREGYTETGWKEYPNPYYKIENNRIPLYIEFSKNEELIFKEKKFKYNTLAKWENREIDKRTGEFNQVNKQRRITQLEEFKIDNPKKMKTPNVFLSIYELPALLHALLIEKKTEAEIEDIIKAKIKKQLTEIAEGRRNLSGLPKGIKKMRNCNSDFEKKKLISDIDNEIKKGEKILEEVQQWLNPVINKKGTGKQENNKPFFSNTYRGKYATWLAYDIKRFTGKDHIQNWKGYQFSELQTLLSLYTLRKEELKNFLEKDLQLTSHPFLKEALKAVNLEDFMGAYLRGRQFFLEKAKKQIGIKGVKKSIFQYFEERKYKIYSSNLDYWEELWKHPVNLDRGLFDERGTVYNKNKELNDLQNRAAWFSFAETNPKQQFYHFPRIYSDEDITKPVTDRYGKTKEKLILFKLSPQKGFMEQIPSDLKKKYQEDKGKVEHPEVQKEKKYEEKKHPGINAFIKNAYKNEQKIRRISRNDIFLYEMVKYMLNKISPATEFSSLDKVWLTRIEREKQATEAREQSFKEKGDTSENKIRQDYLLSFPITLTLFNDIIKEKVKIKDIGRFRKLEKDERVQTMISYYTSGLWKNDQPSLTIKELEAELESYHKIRLQEIFKEVHKLEKEIYEFTPEEDKSKLLARESFPKFKYYISFYFIPKEDQEVFNEIQFDKYKNLEQIPGRKPEYDPYYLLIFIRNKFAHNQLPAEPIYKTALTFLPNNFNTLAEYYHKLFILLNNKNYNN

SEQ ID NO: 64 - protein, 1160 aa, Unknown
  source: /note="Description of Unknown: cas13b sequence"
MNILPAAPEKEKIAYSTATAPWFFGAFLNQARHNLFLTVNDLAIRLGEKVIDYDDQLLNSNVVRMLVNEKASPLQLEILMKYLDRHLPFLIPMQVALKGHQGDASDNPVIGSPADYGAILSKLIVCLNAARNHFSHYHSTSGWSGYNEVIEWMEHVFTRNIETVVKRFTLTEEEVQHLKKPVDKSPKGTIPPYYFSFCKGDIWTDTGLAFFICLFLTREEAYLFLKKLRGFKRGEERFHKATLEAFCVGSLKVPRERLESNNSPQSAFLDMCNELVRCPKSLFDLLEPEKQELFRRDPEPEDAEDNGIEEEEDQPQALLVRKENRFSYFALRYLDIAKAFPRLRFGVDLGTYFFSVYPKTFAGIEETRQLSKRLIGYGKLEEFAREKRPEHIAALFRSKEEANAAPTEPFIRETAPHYHLDGNNVYLYMSGDGEAQWPAVELEEVTGKSYPRKLVKKSTLLPFAVLTVNELPALLFYHLLHKEKGAGDAAERVIINHMERVKRFFKALQDDKVDQVAGQPIRKPDVDADESLHMEYDRRWKLLKKKLSEYQLRASYIPEKIINYLLNIEAVDLGDKAMAQLKNLQRQAQDDIAAIERRMEHLMKKGADGRKTLKVGNLAQQLAEDMLQMQPVQIGTDGEPVPASKANNLAFRLLQSHLAYFAENRHNLPAVFEACGLIGASNKHPFLDNINIESCKGVVDFFILNFRNKLDFLDRCLQEGEWHRYHFISAAKLKSGAKVTIKKYLNEAFESKGRNHIPFTLPPSLFLDASLDWLAKFGDGKAKKVLAENEYVNSVFLIRRLFADGGLQPFYAWKREYRLFEKKAGKAVFLDEAGRMRKADKIGIEVERHREFLARPVKKGKQYDIKKAAAEQFLRSYRFYLQEEKYIRLLAAQDMLLFRCICDLLTYHVGDIGLEELAEAKAGTFSLANITPEKTETAKSLLNYRPAGGVVLDRHFYATDEKGAFVKQEGKLVPGGQVRIFDNTLKIKNAGNFRKLLKDRRMNNLFFYFKQHADEPVVLHRMVLENELRAYDRMRLKVLPVIAEFEKKLYQHCTDVEKERLVVNGSMHHRCYLDVYREKYQPDWGWEAAGNLLRIRNAFVHNQFPLMEGDGFKLEVAHWKKINADFVPSEQGSSLGYGIIDRLGQLAVEGYEGLIKNIHV

SEQ ID NO: 65 - protein, 817 aa, Unknown
  source: /note="Description of Unknown: cas13b sequence"
MGEEEQAHILENSLNDELCEAIDDPFEMIASLSKRARYKDRFPYLMLRYIEEKNLLPFIRFRIDLGCLELASYPKKMGEENNYERSVTDHAMAFGRLTDFHNEDEVLQQITKGITDEVRFSLYAPRYAIYNNKIGFVWTSRSKKKSFPTLKKKEGEGHRVAYTLQNEESFGFISIYDLRKILLLSFLDEGKNIVSGLFKQSKANWENLSENLFDAIRTELQKEFPVPLIRYTLPRSKGGKFVDPKLADKQEKYESEFERRKEKLSEILSEKGFDLSQIPRRMIDEWLNVLPTSKEKKLKGYVETLKLDCRERLRVFEKREKGEHPVPPRIGEMATDLAKDIIRMVIDQGMKQRITSAYYSEIQRCLAQYAGDDNRRHLDSIIRELGLKDRKKGHPFLGKVLRPDLDHTEKLYQRYFKEKKEWLEATFYPAANPKRVPRFVNPPAEKQKELPLIIHNLMKERPEWRDWKQRKNSHPIDLPSQLFENEICRLLKDKIGKESSGKLKWNEMFKLYWDKEFPNGMQRFYRCKRRVEVFDKVVEYEYSEEGGNYKKYYEALINEVVRQKISSSKENSKLQVEDLTLSVRRAFKRAINEKEYQLRLVCEDDRLLFMAVRDLYDWKEVQLDLNKIDNMLGEPVSVSQVIQLENGQPDAVIKAECKLKDVSKLMRYCYDGRVKGLMPYFANHEATQEQVEVELRHYEDHRRRVFDWVFALEKSVLKNEKLRRLYEKSQEGCEHRRCIDALRKATLVSEEEYKFLVHIRNKSAHNQFPDLEFGKLTPNVTSGFCECIWSKYKAIICRIIPFIDPERRFFGKLLEQK

SEQ ID NO: 66 - protein, 1114 aa, Unknown
  source: /note="Description of Unknown: cas13b sequence"
MRIPKLIEEHKSVFGAYSTMALSNVETVLNHIAERAGLDGYERDRGPGVEDYWEHPVMQCLCRKDKPRSIPSDVLLDVRNRLFRSFPFLKIMAENQRDYRNAKGKVECVEINESDIFVVLNNSFRVLKAYRDTCTHYLIENRIWEDNSPMLMYNECPLAAMVNQYYTAALRVTKERYGYETRDLTFIQKRRFKQEPEKEASGNVKKKAVPDLAFFLSLVALNGDGRKWLHLSGWGVVLLICLFLEKKYVNVFLSKLPNPGNYPPSSKERRIIRRSMGVCSVVLPKERIHSETGDLSVALDMLNELKRCPRELFDTLSPGDQERFRTISSDHNEVLQMRSKDRFAQLVLQYIDHNRLFENLRFHVNMGKLRYLFNPKKYCIDGQTRVRVLEHPLNGFGRLQEMEEKRLQENGPFARSGIKVRCFDEVRRDDANESNYPYIVDTYTHYVLENDMVEMFFCPEGSGMKMPEVTSREGKWYVDKKVPHCRMRMSVLELPAMLFHLLLCGAKNTEVHIGKVCDNYCHLFSDMAQGNLTEENILSYGIKKEDIPQKVWDCVRGVHMGKDSRAYREKEIRERYEDVTRRLERLEADRKAVLGGENKIGKRGFVQIVPGRLAAYLATDICRLQPSLRKGDGYGTDRLTGLNFRLLQSSIATYNCGESDILYGRFRDVFCSAGLIGGDNPHPFLDKVLPEAYSVCCPRNTIEFYERYLEEYQRYLKPLVIKLEKGKVPSLSFVNEGQRRWARRDDAYYHELGNLYLSQAIELPRQMFDDEIKDKLREMPEMRDVDFDHANVTFLIGEYLKRVRHDESQEFYSWPRHYKYVDMLKCILNPKNGSLQAVYIQMGEREGLWQERSELEEKYAKIRLRDLGRKGLDKDEANERIKTGLGNRKKEYQKAEKVIRRYKVQDALLFMLAKNTLFNSVEVDDERFKLKDIMPDGEKGILSEVVPMDFCFRSGNSATRKLMGTIHSDNTKIKNYGDFFALANDKRMVTLLPLVGEQCLVKEEVKEEFDKYDDCRPEMISMVFDFEQWAYSAYPELKELVSNEAIKGRLFSNLLQELLGRGELTYEEKYALVGIRNAFLHNSYPKDGGVVKVRTLPDIAKSLKDVFKEYIRLE

SEQ ID NO: 67 - protein, 909 aa, Unknown
  source: /note="Description of Unknown: cas13b sequence"
MKMFYKSVLTAFFTAVDSLRNKYTHYSHKDLNIREIKIECTLGGKDYCIGLLNALDCIYDSAVNLLKLRFMAGEDEVAHLRRCKAVNKKVVVRTEKDGFYYRLSDNGGVTEKGVIFIASMFLNRKYGFLFLKQLEGFKRSDEKRYRLTLEAFLAFSNIKPVDRLKSDKLDRASLGLDMLNELTKIPKELSETLSVDCLYKYLASDGEDDLRSRIRYQDRFVPLALEFISQSDEFKDFRFYTYVGNYVYKGYIKRLIDGTDKERYLSDRLCGFYKSVNDASSDAIAQKYGVEIKDSNEPDYMLPDSFRPHVLRATPHFVINTNNIGIKICGNDCLPIVNGKGVESPEPDYWLSIYELPAMLFYAYLREKNGKRFKDYKSIRELIEGVEKKADEKNDRDKGALMARHIDKEIIWTQTKLDEVKRLEEKKVAAYGKKGRVVLKAGRMADLLAHDMVRLQPATKGSDKITGANFQALQVSLAYFKRDILADVFSRAMLTTGNHRHPFLYRIDVSHCSSLRDFYVAYLGERRKYFEDVAKKIAKNKLNTPCHILRRLQREGSGEEAGKDVKPKFLPRGIFTDSIKNCLEQSKLNIYIRNARNDVKPAINAAYLILMYYKEIEKGEFQGFYGEKRRYDILEEGKPLDLAERKKALASIKPAKIDVSEANMPMSKEEHLMRKRYHAVCNNESAIRMYQVQDILLLLMAKDIFKKALSEGVMSKKIGLENLNGIFDAPVNFVKNFDNIKLTATGIKIKDYGKVCRLGTDFKFNSLIKAFHKVYSKSVEMDYSDYLKEEEEFEKYRLNMVKLCREVERGITEDLHLSLDGKSHLSFNDDVIKPYNDKYNVFNGGDLTFFINARNMFMHGDYKYECVKYVVSEHFKGSLNDVSFAKETYGHFCNLLESMRKKTGLRIDI

SEQ ID NO: 68 - protein, 821 aa, Unknown
  source: /note="Description of Unknown: cas12g sequence"
MLPTRYKPARTLVRPLGRLPHEPRKEFVEKCRRVRMHFEQFNIDVADLCQWLMSLRPNTRIGDAQSTVFWDFFLNPSILTVEADEKERDRWRLAAFDELLQIRFGHDPNAPPWSEEFRSAIRHVAQRPKSATAQRLFDRLRSLTAPHRLVLLKSAAEWIIARYQRGMENWQRQFAEWQREKEEWEAAHPNLTPEVRDAFTRVFKNLFENPDGDGKIGVRRKNPRICSWERLKLNKDNCVYAGQKGHGPLCWEFSKFVKAQKNAGTIKTFFVDVANKYLHVRRNLSKPGVKLKKSPRQEAFKRLYNQKGMEKARNWFTDAWSGYLTALNLNEKTILDHGCLKHCGAIGAEFEKSLCQFNPHTHLCVQYRNALESLEPAIRELEGDYREWRRLFLAPPRKPSFRYPSSRRLPMPKIFGEHFHQIDFDQSILRLRLEDMAEGEWIEFGFKPWPKDYRPGKDEVRVTSVHVNFHGNRMRAGFHFEAPAKPSRFACTQDELDDLRSKQFPRQSQDRQLLEVARRRLLESFDGMLESDLRILAVDLGEKGAAAAVYQGHGHEADVAIPIVKIDRLYDHVPDVLDVESARVPPPKFDDSRDPRGVRKEHVGRHLGQLQRGAQTLAQHRQQDESAPAALRRHDFRSLTRHIRWMIRDWTRHNAAQITAAAETHRCHLIVFESLRGFKPRGYDQMDFAQKARLAFFAYGRVRRKVVEKAVERGLRVVTVPYGFTSQICSECGHRQRNKGRLRKNKYQRRFVCECGEPKKSANKTAAPDRSATVSPCTCRLQLGSDVNAARVLARVFWDEIVLPTREEMREPAVDSAPPSK

SEQ ID NO: 69 - protein, 797 aa, Unknown
  source: /note="Description of Unknown: cas12g sequence"
MCLCTLSGRTRQEEEIIGSTQYTEARSLVRRIRRPRGESRRQFKSNVLLLRRHFEQFNVDASEICQWLMGIRPGGRHADESTGPFWEFFLDPGRFLRETGRGPEDADERIDAYRRIAFDVVAGIEDESRMSDPSIPRQIVESLHAVSMATRTESARRLFERLAGLEPSHRQILLKAAAEWIVSRYWRSVQGWPDRYKHWSDEKEEWEKAHPRLTESLREEFTGIFRDLGIRRKKPRVCPWERLEKGMDNCMYAGERIKVGYSRQSHSQLCAKYERFSYKQRQRTKSGKNFKSYFVKNAELYLKLRRKNRSLIKKDVMKLFRKKVPQALWFEKAWDEYLKALGVDEATLTKDGKLPHCTQFADDKECLFNRHTELCLQYRERLLRLPHLQELEQLYREWRDKYLSGPRRPSLRYPSKRTLPMPKVFGRGYFCADFTNSLLDLRLEGMGEGDFVRFGFAPWPADYDAQPSDATVTSVHIHFVGTRARAGFRFQAPHKTSRFASSQDEIDDLRSRKFPRAAQDGEFLDAARKLLLESFTGDAEREMKLLAVDLGDRGAGAAVFEGRCFKEAMPLKIIKTDTLIDKPPPVTKTPRKGKPGKRESKRARGLDKYHVARHLDTWRKGARKIAERRAKGEADPVKLGAHDMRSLSLHVRWMIRDWVRLNASQIIKTAESHKTDLIVLESLRGFSAPGYHKLDDEKKRTLAFFAYGRIRRKLTEKAVERGMRVVVAPYLRSSQVCAECGREQIDRNKLMKDKRKRRFICEYSDCTWQCDSDQNAACVLGRVFWGEIELPSERKKD

SEQ ID NO: 70 - protein, 830 aa, Unknown
  source: /note="Description of Unknown: cas12g sequence"
MHPSRYKTARTLVRRLCRLPGEDRSAFRSKVGLLRGHFEQFNVDVSELCQWLMSLRKRNKVPENPATFGALGDFLLQPGLPGEETDEKEADRLRLAVFDAVAGFRMLEDRLAASIPASLSDAIRDEAVFLAGVRAAGKPSGLARVLARLEACAPAQRLVLLKSAAEWIVARFLRGTENWMRQRAEWEKEKAAWEAAHPHLTPEVRAQFNKIFESLHDPENSGKPGVSRKNPRICPWDRLKQNLDNCCYGEKGHSALCWRYQDFLKQRMGENRRDKKNFSATAMDLAQICREWKIQHSRNALNNPRVLDRLFAEHERRKQDKTKKESRSPKPRQGGYKANPKADYLRSFKAHWKAYLEHMKLNDTTVLERGCLPHCLSIKKNGKESTCKWNKHTELCLEYKRSLAPLPDSVLELEPEYREWRRLYLHGPGRPHFRYPSAGELPLPKVFGEGFHQVDLDRSIVRLRLEGAAEGEWLEFGFIPWPRGYQPSRREVLITSVQVHFVGTRPRAGFRFDVSHRTSRFGCSQDELDELRSRRYPRQAQDKEFLAAARAQLIQTFEGGEGAARQQMRVMSVDLGEGGACASIYEGRTHQKDESLKVIKIDRRYDQHPEVLEKDVGAAKPQKFEKSDPRGVRKEHVARHLNRIAAGASAIAEHRRKERSDAECSVGELQEHDFRSLKRHIAWMIRDWVRLNAAQIIDVAKQHCCDLIVFESQRGFRLPGYDELDRGKKQRFAILAFGRIRRKVVEKAVEHGMRVVTVPYFASSQVCSACKRVQENRGSWRENKKKRVFACEFCKLKLNSDANASRVLARVFWGEIELPEPTRAHLPSKA

SEQ ID NO: 71 - protein, 864 aa, Unknown
  source: /note="Description of Unknown: cas12g sequence"
MPVSRYSESRTLVRPLARLPHEERQDVTPKVARLRRHFERFNVDVAELCQWLMGLRNQFGPKESPASFGPLGDFLIEPALDNIDADETERDRWRLAVFDAVAGFRPIRGLGDHPVPDTLRLAMQQAASLSPTPTTARLLERLRPLSPAHRLVLLKSAAEWIVARYQRGMENWVIQHAAWHKEKEAWEREHPALTPAVRERFTALYKQLSDSKPTDRPVSRRKNPRICEWERLRQNIDNCCYAGEKGHGPLCRKYANFVKARKAVDGKFNDLLFWDTATSFIALCRKFNVTRARNALQSQLDALFAEDQRRKAERDQAKGRQPRPLHPQAAARAKSDFLRIFKDGWNAYLSAMGLNDSTAIEKGRLPHCQKIGGTFENSKCEWNPHTDLCHQYRRLAGQLDDATLALEKDYREWRRLYLAGPRKPSFQYPSSRDLPMPKIFGAGFFELDMDRSILRLRLDDMVEGEWLEFGFKPWPREYTPSRAQVARPGRITSVHVNFIGSRCRVGFRFEAPHAGSRFGCSQDEIDQLRRDHPRERDDQPFLEAARKRLVETFAGDARRDLRLLAVDVGEKGCCAAVYQGTRYVADALLPIIKINQLYTEPPTELKPDSHNRPAPDRRPFNDEKDPRDPRGVRKEHVARHLKRMADKAPEVAAYRLAQREKAAPSPSASPPPVTLGVHDFRRLKRHVTWMIRDWARHNAARIVAEAQRHGCDLIVFESHRGRRPPGYHEVGDDAERRKLDNATFAFGRIRRKVTEKAVERGLRVVTVPYHCSSKVCSRCGRLQENDGLLRRNKKERKFICEQCKFETNSDGNAARVLARVFWGEIMLPSPEERRKKREGSGGRSPTPANPGGLVDAPPSRRNLR

SEQ ID NO: 72 - DNA, 19 bp, Artificial Sequence
  source: /note="Description of Artificial Sequence: Synthetic oligonucleotide"
tgaaaataggacctgagcg

SEQ ID NO: 73 - DNA, 19 bp, Artificial Sequence
  source: /note="Description of Artificial Sequence: Synthetic oligonucleotide"
acacctagtcatgattgca

SEQ ID NO: 74 - DNA, 41 bp, Artificial Sequence
  source: /note="Description of Artificial Sequence: Synthetic oligonucleotide"
ccaatagaatgatgccaacaggcgatagacgtgccacatgc

SEQ ID NO: 75 - DNA, 45 bp, Artificial Sequence
  source: /note="Description of Artificial Sequence: Synthetic oligonucleotide"
gattgatgttcaacaatggggtttcattaccatggacttgacaat

SEQ ID NO: 76 - DNA, 47 bp, Artificial Sequence
  source: /note="Description of Artificial Sequence: Synthetic oligonucleotide"
gaaattaatacgactcactatagggaagtgtctgaagcagtggaaaa

SEQ ID NO: 77 - DNA, 64 bp, Artificial Sequence
  source: /note="Description of Artificial Sequence: Synthetic oligonucleotide"
gatttagactaccccaaaaacgaaggggactaaaacgatcatggttgctttgtaggttacctgt

SEQ ID NO: 78 - DNA, 18 bp, Artificial Sequence
  source: /note="Description of Artificial Sequence: Synthetic oligonucleotide"
gcttctacgcagaaggga

SEQ ID NO: 79 - DNA, 18 bp, Artificial Sequence
  source: /note="Description of Artificial Sequence: Synthetic oligonucleotide"
gtgacagtttggccttgt

SEQ ID NO: 80 - DNA, 41 bp, Artificial Sequence
  source: /note="Description of Artificial Sequence: Synthetic oligonucleotide"
tactgctgcctggagttgaattcctcttctcgttcctcatc

SEQ ID NO: 81 - DNA, 38 bp, Artificial Sequence
  source: /note="Description of Artificial Sequence: Synthetic oligonucleotide"
gctttgctgctgcttgacagtgttgttggcctttacca

SEQ ID NO: 82 - DNA, 22 bp, Artificial Sequence
  source: /note="Description of Artificial Sequence: Synthetic oligonucleotide"
attgaaccagcttgagagcaaa

SEQ ID NO: 83 - DNA, 46 bp, Artificial Sequence
  source: /note="Description of Artificial Sequence: Synthetic oligonucleotide"
gaaattaatacgactcactatagggcttgaactgttgcgactacgt

SEQ ID NO: 84 - DNA, 64 bp, Artificial Sequence
  source: /note="Description of Artificial Sequence: Synthetic oligonucleotide"
gatttagactaccccaaaaacgaaggggactaaaacggtgatgctgctcttgctttgctgctgc

SEQ ID NO: 85 - DNA, 17 bp, Artificial Sequence
  source: /note="Description of Artificial Sequence: Synthetic oligonucleotide"
ttgatgagctggagcca

SEQ ID NO: 86 - DNA, 18 bp, Artificial Sequence
  source: /note="Description of Artificial Sequence: Synthetic oligonucleotide"
caccctcaatgcagagtc

SEQ ID NO: 87 - DNA, 41 bp, Artificial Sequence
  source: /note="Description of Artificial Sequence: Synthetic oligonucleotide"
gtgtgaccctgaagactcggttttagccactgactcggatc

SEQ ID NO: 88 - DNA, 45 bp, Artificial Sequence
  source: /note="Description of Artificial Sequence: Synthetic oligonucleotide"
cctccgtgatatggctcttcgtttttttcttacatggctctggtc

SEQ ID NO: 89 - DNA, 20 bp, Artificial Sequence
  source: /note="Description of Artificial Sequence: Synthetic oligonucleotide"
atgtggatggctgagttgtt

SEQ ID NO: 90 - DNA, 44 bp, Artificial Sequence
  source: /note="Description of Artificial Sequence: Synthetic oligonucleotide"
gaattaatacgactcactatagggcatgctgagtactggacctc

SEQ ID NO: 91 - DNA, 64 bp, Artificial Sequence
  source: /note="Description of Artificial Sequence: Synthetic oligonucleotide"
gatttagactaccccaaaaacgaaggggactaaaacagtggaggagtgtcttttcaattacttg

SEQ ID NO: 92 - DNA, 19 bp, Artificial Sequence
  source: /note="Description of Artificial Sequence: Synthetic primer"
caacgtgttgtagcttgtc

SEQ ID NO: 93 - DNA, 22 bp, Artificial Sequence
  source: /note="Description of Artificial Sequence: Synthetic primer"
accatcagtagataaaagtgca

SEQ ID NO: 94 - DNA, 45 bp, Artificial Sequence
  source: /note="Description of Artificial Sequence: Synthetic primer"
gaaccgccacacatgaccatctatagattagctaatgagtgtgct

SEQ ID NO: 95 - DNA, 40 bp, Artificial Sequence
  source: /note="Description of Artificial Sequence: Synthetic primer"
ggtggaacctcatcaggagatgtaacattggccgtgacag

SEQ ID NO: 96 - DNA, 25 bp, Artificial Sequence
  source: /note="Description of Artificial Sequence: Synthetic primer"
ccacaactgcttatgctaatagtgt

SEQ ID NO: 97 - DNA, 25 bp, Artificial Sequence
  source: /note="Description of Artificial Sequence: Synthetic primer"
cgtttctatagattagctaatgagt

SEQ ID NO: 98 - DNA, 21 bp, Artificial Sequence
  source: /note="Description of Artificial Sequence: Synthetic primer"
ggcaattttgttaccatcagt

SEQ ID NO: 99 - DNA, 47 bp, Artificial Sequence
  source: /note="Description of Artificial Sequence: Synthetic primer"
gaggttccacctggtttaacatatagctcaagtattgagtgaaatgg

SEQ ID NO: 100 - DNA, 46 bp, Artificial Sequence
  source: /note="Description of Artificial Sequence: Synthetic primer"
caggagatgccacaactgcttatagataaaagtgcattaacattgg

SEQ ID NO: 101 - DNA, 23 bp, Artificial Sequence
  source: /note="Description of Artificial Sequence: Synthetic primer"
taacatttgtcaagctgtcacgg

SEQ ID NO: 102 - DNA, 18 bp, Artificial Sequence
  source: /note="Description of Artificial Sequence: Synthetic primer"
atggcctcacttgttctt

SEQ ID NO: 103 - DNA, 18 bp, Artificial Sequence
  source: /note="Description of Artificial Sequence: Synthetic primer"
taacattggccgtgacag

SEQ ID NO: 104 - DNA, 43 bp, Artificial Sequence
  source: /note="Description of Artificial Sequence: Synthetic primer"
acttgagcacactcattagctaatcgctcgcaaacatacaacg

SEQ ID NO: 105 - DNA, 42 bp, Artificial Sequence
  source: /note="Description of Artificial Sequence: Synthetic primer"
gtcatgtgtggcggttcactacactattagcataagcagttg

SEQ ID NO: 106 - DNA, 21 bp, Artificial Sequence
  source: /note="Description of Artificial Sequence: Synthetic primer"
acggtgtgacaagctacaaca

SEQ ID NO: 107 - DNA, 25 bp, Artificial Sequence
  source: /note="Description of Artificial Sequence: Synthetic primer"
atgttaaaccaggtggaacctcatc

SEQ ID NO: 108 - DNA, 18 bp, Artificial Sequence
  source: /note="Description of Artificial Sequence: Synthetic primer"
gctcgcaaacatacaacg

SEQ ID NO: 109 - DNA, 18 bp, Artificial Sequence
  source: /note="Description of Artificial Sequence: Synthetic primer"
gcattaacattggccgtg

SEQ ID NO: 110 - DNA, 42 bp, Artificial Sequence
  source: /note="Description of Artificial Sequence: Synthetic primer"
accatttcactcaatacttgagcagtagcttgtcacaccgtt

SEQ ID NO: 111 - DNA, 47 bp, Artificial Sequence
  source: /note="Description of Artificial Sequence: Synthetic primer"
atatgttaaaccaggtggaacctcgcttgacaaatgttaaaaacact

SEQ ID NO: 112 - DNA, 24 bp, Artificial Sequence
  source: /note="Description of Artificial Sequence: Synthetic primer"
tcaggagatgccacaactgcttat

SEQ ID NO: 113 - DNA, 23 bp, Artificial Sequence
  source: /note="Description of Artificial Sequence: Synthetic primer"
cctaacatgcttagaattatggc

SEQ ID NO: 114 - DNA, 18 bp, Artificial Sequence
  source: /note="Description of Artificial Sequence: Synthetic primer"
taacattggccgtgacag

SEQ ID NO: 115 - DNA, 43 bp, Artificial Sequence
  source: /note="Description of Artificial Sequence: Synthetic primer"
acttgagcacactcattagctaatccacttgttcttgctcgca

SEQ ID NO: 116 - DNA, 42 bp, Artificial Sequence
  source: /note="Description of Artificial Sequence: Synthetic primer"
gtcatgtgtggcggttcactcactattagcataagcagttgt

SEQ ID NO: 117 - DNA, 25 bp, Artificial Sequence
  source: /note="Description of Artificial Sequence: Synthetic primer"
gacaagctacaacacgttgtatgtt

SEQ ID NO: 118 - DNA, 22 bp, Artificial Sequence
  source: /note="Description of Artificial Sequence: Synthetic primer"
taaaccaggtggaacctcatca

SEQ ID NO: 119 - DNA, 18 bp, Artificial Sequence
  source: /note="Description of Artificial Sequence: Synthetic primer"
tgttcttgctcgcaaaca

SEQ ID NO: 120 - DNA, 18 bp, Artificial Sequence
  source: /note="Description of Artificial Sequence: Synthetic primer"
taacattggccgtgacag

SEQ ID NO: 121 - DNA, 46 bp, Artificial Sequence
  source: /note="Description of Artificial Sequence: Synthetic primer"
actcaatacttgagcacactcattatacaacgtgttgtagcttgtc

SEQ ID NO: 122 - DNA, 42 bp, Artificial Sequence
  source: /note="Description of Artificial Sequence: Synthetic primer"
atggtcatgtgtggcggttcctattagcataagcagttgtgg

SEQ ID NO: 123 - DNA, 23 bp, Artificial Sequence
  source: /note="Description of Artificial Sequence: Synthetic primer"
gttaaaccaggtggaacctcatc

SEQ ID NO: 124 - DNA, 19 bp, Artificial Sequence
  source: /note="Description of Artificial Sequence: Synthetic primer"
caacgtgttgtagcttgtc

SEQ ID NO: 125 - DNA, 22 bp, Artificial Sequence
  source: /note="Description of Artificial Sequence: Synthetic primer"
accatcagtagataaaagtgca

SEQ ID NO: 126 - DNA, 45 bp, Artificial Sequence
  source: /note="Description of Artificial Sequence: Synthetic primer"
ggtttaacatatagtgaaccgccacgctaatgagtgtgctcaagt

SEQ ID NO: 127 - DNA, 40 bp, Artificial Sequence; identical to SEQ ID NO: 95
  source: /note="Description of Artificial Sequence: Synthetic primer"

SEQ ID NO: 128 - DNA, 25 bp, Artificial Sequence
  source: /note="Description of Artificial Sequence: Synthetic primer"
ccacaactgcttatgctaatagtgt

SEQ ID NO: 129 - DNA, 20 bp, Artificial Sequence
  source: /note="Description of Artificial Sequence: Synthetic primer"
gctaatgagtgtgctcaagt

SEQ ID NO: 130 - DNA, 22 bp, Artificial Sequence
  source: /note="Description of Artificial Sequence: Synthetic primer"
acttatcggcaattttgttacc

SEQ ID NO: 131 - DNA, 40 bp, Artificial Sequence
  source: /note="Description of Artificial Sequence: Synthetic primer"
cctgatgaggttccacctggtgagtgaaatggtcatgtgt

SEQ ID NO: 132 - DNA, 46 bp, Artificial Sequence
  source: /note="Description of Artificial Sequence: Synthetic primer"
gatgccacaactgcttatgctgtagataaaagtgcattaacattgg

SEQ ID NO: 133 - DNA, 23 bp, Artificial Sequence
  source: /note="Description of Artificial Sequence: Synthetic primer"
taacatttgtcaagctgtcacgg

SEQ ID NO: 134 - DNA, 20 bp, Artificial Sequence
  source: /note="Description of Artificial Sequence: Synthetic primer"
catggctttgagttgacatc

SEQ ID NO: 135 - DNA, 19 bp, Artificial Sequence
  source: /note="Description of Artificial Sequence: Synthetic primer"
acctgtaaaaccccattgt

SEQ ID NO: 136 - DNA, 48 bp, Artificial Sequence
  source: /note="Description of Artificial Sequence: Synthetic primer"
atgtggcacgtctatcacatagatgaagtattttgtgaaaataggacc

SEQ ID NO: 137 - DNA, 46 bp, Artificial Sequence
  source: /note="Description of Artificial Sequence: Synthetic primer"
tccactgcttcagacacttatgctgaacatcaatcataaacggatt

SEQ ID NO: 138 - DNA, 19 bp, Artificial Sequence
  source: /note="Description of Artificial Sequence: Synthetic primer"
tgatgttcaacaatggggt

SEQ ID NO: 139 - DNA, 22 bp, Artificial Sequence
  source: /note="Description of Artificial Sequence: Synthetic primer"
ttaatcttcagttcatcaccaa

SEQ ID NO: 140 - DNA, 47 bp, Artificial Sequence
  source: /note="Description of Artificial Sequence: Synthetic primer"
gctacatgtgcattaccatggacttttacaggtaacctacaaagcaa

SEQ ID NO: 141 - DNA, 50 bp, Artificial Sequence
  source: /note="Description of Artificial Sequence: Synthetic primer"
agttgtgatgcaatcatgactaggtttataggatattcaatagtccagtc

SEQ ID NO: 142 - DNA, 21 bp, Artificial Sequence
  source: /note="Description of Artificial Sequence: Synthetic primer"
ccacgagtgctttgttaagcg

SEQ ID NO: 143 - DNA, 22 bp, Artificial Sequence
  source: /note="Description of Artificial Sequence: Synthetic primer"
ccatgatctgtattgtcaagtc

SEQ ID NO: 144 - DNA, 19 bp, Artificial Sequence
  source: /note="Description of Artificial Sequence: Synthetic primer"
gaactgggaatttgtctgc

SEQ ID NO: 145 - DNA, 41 bp, Artificial Sequence
  source: /note="Description of Artificial Sequence: Synthetic primer"
cgtggacagctagacacctagcatggtaatgcacatgtagc

SEQ ID NO: 146 - DNA, 45 bp, Artificial Sequence
  source: /note="Description of Artificial Sequence: Synthetic primer"
gcgtgttgactggactattgaatataaccatgtgttgaacctttc

SEQ ID NO: 147 - DNA, 25 bp, Artificial Sequence
  source: /note="Description of Artificial Sequence: Synthetic primer"
atgaactgaagattaatgcggcttg

SEQ ID NO: 148 - DNA, 25 bp, Artificial Sequence
  source: /note="Description of Artificial Sequence: Synthetic primer"
catcattctattggatttgattacg

SEQ ID NO: 149 - DNA, 20 bp, Artificial Sequence
  source: /note="Description of Artificial Sequence: Synthetic primer"
tcaatagtccagtcaacacg

SEQ ID NO: 150 - DNA, 48 bp, Artificial Sequence
  source: /note="Description of Artificial Sequence: Synthetic primer"
agatcatggttgctttgtaggttacaatccgtttatgattgatgttca

SEQ ID NO: 151 - DNA, 42 bp, Artificial Sequence
  source: /note="Description of Artificial Sequence: Synthetic primer"
gtcaagtccatggtaatgcacatcttaacaaagcactcgtgg

SEQ ID NO: 152 - DNA, 24 bp, Artificial Sequence
  source: /note="Description of Artificial Sequence: Synthetic primer"
tgtgatgcaatcatgactaggtgt

SEQ ID NO: 153 - DNA, 25 bp, Artificial Sequence
  source: /note="Description of Artificial Sequence: Synthetic primer"
gtctataatccgtttatgattgatg

SEQ ID NO: 154 - DNA, 21 bp, Artificial Sequence
  source: /note="Description of Artificial Sequence: Synthetic primer"
ccgcattaatcttcagttcat

SEQ ID NO: 155 - DNA, 46 bp, Artificial Sequence
  source: /note="Description of Artificial Sequence: Synthetic primer"
tacatgtgcattaccatggacttgaaacaatggggttttacaggta

SEQ ID NO: 156 - DNA, 50 bp, Artificial Sequence; identical to SEQ ID NO: 141
  source: /note="Description of Artificial Sequence: Synthetic primer"

SEQ ID NO: 157 - DNA, 23 bp, Artificial Sequence
  source: /note="Description of Artificial Sequence: Synthetic primer"
cagatcatggttgctttgtaggt

SEQ ID NO: 158 - DNA, 19 bp, Artificial Sequence
  source: /note="Description of Artificial Sequence: Synthetic primer"
agctgtccacgagtgcttt

SEQ ID NO: 159 - DNA, 18 bp, Artificial Sequence
  source: /note="Description of Artificial Sequence: Synthetic primer"
acacttatgcctgttggc

SEQ ID NO: 160 - DNA, 19 bp, Artificial Sequence
  source: /note="Description of Artificial Sequence: Synthetic primer"
acacgcttaacaaagcact

SEQ ID NO: 161 - DNA, 48 bp, Artificial Sequence
  source: /note="Description of Artificial Sequence: Synthetic primer"
aggttacctgtaaaaccccattgtgatttgattacgtctataatccgt

SEQ ID NO: 162 - DNA, 45 bp, Artificial Sequence
  source: /note="Description of Artificial Sequence: Synthetic primer"
aagcaaccatgatctgtattgtcatagacacctagtcatgattgc

SEQ ID NO: 163 - DNA, 25 bp, Artificial Sequence
  source: /note="Description of Artificial Sequence: Synthetic primer"
tggtaatgcacatgtagctagttgt

SEQ ID NO: 164 - DNA, 19 bp, Artificial Sequence
  source: /note="Description of Artificial Sequence: Synthetic primer"
tgaaaataggacctgagcg

SEQ ID NO: 165 - DNA, 19 bp, Artificial Sequence
  source: /note="Description of Artificial Sequence: Synthetic primer"
acacctagtcatgattgca

SEQ ID NO: 166 - DNA, 41 bp, Artificial Sequence; identical to SEQ ID NO: 74
  source: /note="Description of Artificial Sequence: Synthetic primer"

SEQ ID NO: 167 - DNA, 45 bp, Artificial Sequence; identical to SEQ ID NO: 75
  source: /note="Description of Artificial Sequence: Synthetic primer"

SEQ ID NO: 168 - DNA, 22 bp, Artificial Sequence
  source: /note="Description of Artificial Sequence: Synthetic primer"
aagtgtctgaagcagtggaaaa

SEQ ID NO: 169 - DNA, 24 bp, Artificial Sequence
  source: /note="Description of Artificial Sequence: Synthetic primer"
ggtaacctacaaagcaaccatgat

SEQ ID NO: 170 - DNA, 19 bp, Artificial Sequence
  source: /note="Description of Artificial Sequence: Synthetic primer"
agtccatggtaatgcacat

SEQ ID NO: 171 - DNA, 19 bp, Artificial Sequence
  source: /note="Description of Artificial Sequence: Synthetic primer"
gggttaccaatgtcgtgaa

SEQ ID NO: 172 - DNA, 42 bp, Artificial Sequence
  source: /note="Description of Artificial Sequence: Synthetic primer"
gcttaacaaagcactcgtggagtagctagttgtgatgcaatc

SEQ ID NO: 173 - DNA, 44 bp, Artificial Sequence
  source: /note="Description of Artificial Sequence: Synthetic primer"
gatgaactgaagattaatgcggcttgaactgggaatttgtctgc

SEQ ID NO: 174 - DNA, 25 bp, Artificial Sequence
  source: /note="Description of Artificial Sequence: Synthetic primer"
tcaacacatggttgttaaagctgca

SEQ ID NO: 175 - DNA, 20 bp, Artificial Sequence
  source: /note="Description of Artificial Sequence: Synthetic primer"
atcagaggcacgtcaacatc

SEQ ID NO: 176 - DNA, 20 bp, Artificial Sequence
  source: /note="Description of Artificial Sequence: Synthetic primer"
tcaccactacgaccgtactg

SEQ ID NO: 177 - DNA, 42 bp, Artificial Sequence
  source: /note="Description of Artificial Sequence: Synthetic primer"
agggctgttcaagttgaggcaaagatggcacttgtggcttag

SEQ ID NO: 178 - DNA, 41 bp, Artificial Sequence
  source: /note="Description of Artificial Sequence: Synthetic primer"
acgttcggatgctcgaactgcatgccttcgagttctgctac

SEQ ID NO: 179 - DNA, 20 bp, Artificial Sequence
  source: /note="Description of Artificial Sequence: Synthetic primer"
aacgcctttttcaacttcta

SEQ ID NO: 180 - DNA, 20 bp, Artificial Sequence
  source: /note="Description of Artificial Sequence: Synthetic primer"
agatggcacttgtggcttag

SEQ ID NO: 181 - DNA, 20 bp, Artificial Sequence
  source: /note="Description of Artificial Sequence: Synthetic primer"
cgaagaagaaccttgcggta

SEQ ID NO: 182 - DNA, 41 bp, Artificial Sequence
  source: /note="Description of Artificial Sequence: Synthetic primer"
gcagttcgagcatccgaacgttggcgttttgcctcaacttg

SEQ ID NO: 183 - DNA, 42 bp, Artificial Sequence
  source: /note="Description of Artificial Sequence: Synthetic primer"
tcgaaggcattcagtacggtcgactggtatttcgcccacatg

SEQ ID NO: 184 - DNA, 24 bp, Artificial Sequence
  source: /note="Description of Artificial Sequence: Synthetic primer"
ggtgagacacttggtgtccttgtc

SEQ ID NO: 185 - DNA, 19 bp, Artificial Sequence
  source: /note="Description of Artificial Sequence: Synthetic primer"
cctcaacttgaacagccct

SEQ ID NO: 186 - DNA, 19 bp, Artificial Sequence
  source: /note="Description of Artificial Sequence: Synthetic primer"
acgaagaagaaccttgcgg

SEQ ID NO: 187 - DNA, 42 bp, Artificial Sequence
  source: /note="Description of Artificial Sequence: Synthetic primer"
gccttcgagttctgctaccagctcatcaaacgttcggatgct

SEQ ID NO: 188 - DNA, 42 bp, Artificial Sequence
  source: /note="Description of Artificial Sequence: Synthetic primer"
acggtcgtagtggtgagacacttaagccactggtatttcgcc

SEQ ID NO: 189 - DNA, 20 bp, Artificial Sequence
  source: /note="Description of Artificial Sequence: Synthetic primer"
tgaccatgaggtgcagttcg

SEQ ID NO: 190 - DNA, 21 bp, Artificial Sequence
  source: /note="Description of Artificial Sequence: Synthetic primer"
tggtgtccttgtccctcatgt

SEQ ID NO: 191 - DNA, 19 bp, Artificial Sequence
  source: /note="Description of Artificial Sequence: Synthetic primer"
cctcaacttgaacagccct

SEQ ID NO: 192 - DNA, 18 bp, Artificial Sequence
  source: /note="Description of Artificial Sequence: Synthetic primer"
tatggccaccagctcctt

SEQ ID NO: 193 - DNA, 41 bp, Artificial Sequence
  source: /note="Description of Artificial Sequence: Synthetic primer"
cgaccgtactgaatgccttcgacgttcggatgctcgaactg

SEQ ID NO: 194 - DNA, 42 bp, Artificial Sequence
  source: /note="Description of Artificial Sequence: Synthetic primer"
gacacttggtgtccttgtccctagaagaaccttgcggtaagc

SEQ ID NO: 195 - DNA, 21 bp, Artificial Sequence
  source: /note="Description of Artificial Sequence: Synthetic primer"
catgtgggcgaaataccagtg

SEQ ID NO: 196 - DNA, 19 bp, Artificial Sequence
  source: /note="Description of Artificial Sequence: Synthetic primer"
cttatcagaggcacgtcaa

SEQ ID NO: 197 - DNA, 18 bp, Artificial Sequence
  source: /note="Description of Artificial Sequence: Synthetic primer"
tacgaccgtactgaatgc

SEQ ID NO: 198 - DNA, 41 bp, Artificial Sequence
  source: /note="Description of Artificial Sequence: Synthetic primer"
tcaagttgaggcaaaacgcctcttaaagatggcacttgtgg

SEQ ID NO: 199 - DNA, 42 bp, Artificial Sequence
  source: /note="Description of Artificial Sequence: Synthetic primer"
agccctatgtgttcatcaaacgttcttcgagttctgctacca

SEQ ID NO: 200 - DNA, 19 bp, Artificial Sequence
  source: /note="Description of Artificial Sequence: Synthetic primer"
tttttcaacttctactaag

SEQ ID NO: 201 - DNA, 21 bp, Artificial Sequence
  source: /note="Description of Artificial Sequence: Synthetic primer"
catcttaaagatggcacttgt

SEQ ID NO: 202 - DNA, 18 bp, Artificial Sequence
  source: /note="Description of Artificial Sequence: Synthetic primer"
agtgtctcaccactacga

SEQ ID NO: 203 - DNA, 47 bp, Artificial Sequence
  source: /note="Description of Artificial Sequence: Synthetic primer"
gtttgatgaacacatagggctgttggcttagtagaagttgaaaaagg

SEQ ID NO: 204 - DNA, 38 bp, Artificial Sequence
  source: /note="Description of Artificial Sequence: Synthetic primer"
gttcggatgctcgaactgcaccgtactgaatgccttcg

SEQ ID NO: 205 - DNA, 17 bp, Artificial Sequence
  source: /note="Description of Artificial Sequence: Synthetic primer"
caagttgaggcaaaacg

SEQ ID NO: 206 - DNA, 18 bp, Artificial Sequence
  source: /note="Description of Artificial Sequence: Synthetic primer"
gatggcacttgtggctta

SEQ ID NO: 207 - DNA, 18 bp, Artificial Sequence
  source: /note="Description of Artificial Sequence: Synthetic primer"
aggacaccaagtgtctca

SEQ ID NO: 208 - DNA, 44 bp, Artificial Sequence
  source: /note="Description of Artificial Sequence: Synthetic primer"
ccgaacgtttgatgaacacatagggtagaagttgaaaaaggcgt

SEQ ID NO: 209 - DNA, 39 bp, Artificial Sequence
  source: /note="Description of Artificial Sequence: Synthetic primer"
atgctcgaactgcacctcatccactacgaccgtactgaa

SEQ ID NO: 210 - DNA, 20 bp, Artificial Sequence
  source: /note="Description of Artificial Sequence: Synthetic primer"
gctgttcaagttgaggcaaa

SEQ ID NO: 211 - DNA, 21 bp, Artificial Sequence
  source: /note="Description of Artificial Sequence: Synthetic primer"
gtagaagttgaaaaaggcgtt

SEQ ID NO: 212 - DNA, 18 bp, Artificial Sequence
  source: /note="Description of Artificial Sequence: Synthetic primer"
gaagaagaaccttgcggt

SEQ ID NO: 213 - DNA, 38 bp, Artificial Sequence
  source: /note="Description of Artificial Sequence: Synthetic primer"
accatgaggtgcagttcgaggcctcaacttgaacagcc

SEQ ID NO: 214 - DNA, 41 bp, Artificial Sequence
  source: /note="Description of Artificial Sequence: Synthetic primer"
agaactcgaaggcattcagtacgaagccactggtatttcgc

SEQ ID NO: 215 - DNA, 24 bp, Artificial Sequence
  source: /note="Description of Artificial Sequence: Synthetic primer"
tccgaacgtttgatgaacacatag

SEQ ID NO: 216 - DNA, 22 bp, Artificial Sequence
  source: /note="Description of Artificial Sequence: Synthetic primer"
gtcgtagtggtgagacacttgg

SEQ ID NO: 217 - DNA, 18 bp, Artificial Sequence
  source: /note="Description of Artificial Sequence: Synthetic primer"
tcaaacgttcggatgctc

SEQ ID NO: 218 - DNA, 19 bp, Artificial Sequence
  source: /note="Description of Artificial Sequence: Synthetic primer"
ccagctcctttattaccgt

SEQ ID NO: 219 - DNA, 41 bp, Artificial Sequence
  source: /note="Description of Artificial Sequence: Synthetic primer"
cgtactgaatgccttcgagttctgaactgcacctcatggtc

SEQ ID NO: 220 - DNA, 40 bp, Artificial Sequence
  source: /note="Description of Artificial Sequence: Synthetic primer"
gtcgtagtggtgagacacttggacgaagaagaaccttgcg

SEQ ID NO: 221 - DNA, 22 bp, Artificial Sequence
  source: /note="Description of Artificial Sequence: Synthetic primer"
gctaccagctcaaccataacat

SEQ ID NO: 222 - DNA, 21 bp, Artificial Sequence
  source: /note="Description of Artificial Sequence: Synthetic primer"
cttgtccctcatgtgggcgaa

SEQ ID NO: 223 - DNA, 21 bp, Artificial Sequence
  source: /note="Description of Artificial Sequence: Synthetic primer"
tgttatggagtgtctcctact

SEQ ID NO: 224 - DNA, 22 bp, Artificial Sequence
  source: /note="Description of Artificial Sequence: Synthetic primer"
ccaaccttagaatcaagattgt

SEQ ID NO: 225 - DNA, 50 bp, Artificial Sequence
  source: /note="Description of Artificial Sequence: Synthetic primer"
cgatttgtctgacttcatcacctctaaatgatctctgctttactaatgtc

SEQ ID NO: 226 - DNA, 38 bp, Artificial Sequence
  source: /note="Description of Artificial Sequence: Synthetic primer"
ctccagggcaaactggaaagcaagctataacgcagcct

SEQ ID NO: 227 - DNA, 25 bp, Artificial Sequence
  source: /note="Description of Artificial Sequence: Synthetic primer"
caacagaatctattgttagatttcc

SEQ ID NO: 228 - DNA, 23 bp, Artificial Sequence
  source: /note="Description of Artificial Sequence: Synthetic primer"
agacattagtaaagcagagatca

SEQ ID NO: 229 - DNA, 46 bp, Artificial Sequence
  source: /note="Description of Artificial Sequence: Synthetic primer"
ttctcttcctgttccaagcataaaccttttggtgaagtttttaacg

SEQ ID NO: 230 - DNA, 46 bp, Artificial Sequence
  source: /note="Description of Artificial Sequence: Synthetic primer"
actgtgttgctgattattctgtccaatttagtaggagacactccat

SEQ ID NO: 231 - DNA, 25 bp, Artificial Sequence
  source: /note="Description of Artificial Sequence: Synthetic primer"
ccgcatcattttccacttttaagtg

SEQ ID NO: 232 - DNA, 25 bp, Artificial Sequence
  source: /note="Description of Artificial Sequence: Synthetic primer"
caacagaatctattgttagatttcc

SEQ ID NO: 233 - DNA, 23 bp, Artificial Sequence
  source: /note="Description of Artificial Sequence: Synthetic primer"
agacattagtaaagcagagatca

SEQ ID NO: 234 - DNA, 44 bp, Artificial Sequence
  source: /note="Description of Artificial Sequence: Synthetic primer"
gttccaagcataaacagatgcaaatcaaacttgtgcccttttgg

SEQ ID NO: 235 - DNA, 46 bp, Artificial Sequence; identical to SEQ ID NO: 230
  source: /note="Description of Artificial Sequence: Synthetic primer"

SEQ ID NO: 236 - DNA, 23 bp, Artificial Sequence
  source: /note="Description of Artificial Sequence: Synthetic primer"
tgatctctgctttactaatgtct

SEQ ID NO: 237 - DNA, 24 bp, Artificial Sequence
  source: /note="Description of Artificial Sequence: Synthetic primer"
tgagattagacttcctaaacaatc

SEQ ID NO: 238 - DNA, 45 bp, Artificial Sequence
  source: /note="Description of Artificial Sequence: Synthetic primer"
cagtttgccctggagcgattatgcagattcatttgtaattagagg

SEQ ID NO: 239 - DNA, 44 bp, Artificial Sequence
  source: /note="Description of Artificial Sequence: Synthetic primer"
taccagatgattttacaggctgcccaccaaccttagaatcaaga

SEQ ID NO: 240 - DNA, 23 bp, Artificial Sequence
  source: /note="Description of Artificial Sequence: Synthetic primer"
acttttaagtgttatggagtgtc

SEQ ID NO: 241 - DNA, 22 bp, Artificial Sequence
  source: /note="Description of Artificial Sequence: Synthetic primer"
ccaaccttagaatcaagattgt

SEQ ID NO: 242 - DNA, 50 bp, Artificial Sequence
  source: /note="Description of Artificial Sequence: Synthetic primer"
cgatttgtctgacttcatcacctcttcctactaaattaaatgatctctgc

SEQ ID NO: 243 - DNA, 38 bp, Artificial Sequence
  source: /note="Description of Artificial Sequence: Synthetic primer"
ctccagggcaaactggaaagtccaagctataacgcagc

SEQ ID NO: 244 - DNA, 21 bp, Artificial Sequence
  source: /note="Description of Artificial Sequence: Synthetic primer"
tgttatggagtgtctcctact

SEQ ID NO: 245 - DNA, 21 bp, Artificial Sequence
  source: /note="Description of Artificial Sequence: Synthetic primer"
ccaccaaccttagaatcaaga

SEQ ID NO: 246 - DNA, 47 bp, Artificial Sequence
  source: /note="Description of Artificial Sequence: Synthetic primer"
gagcgatttgtctgacttcatcatgctttactaatgtctatgcagat

SEQ ID NO: 247 - DNA, 45 bp, Artificial Sequence
  source: /note="Description of Artificial Sequence: Synthetic primer"
ggcaaactggaaagattgctgatgttagaattccaagctataacg

SEQ ID NO: 248 - DNA, 21 bp, Artificial Sequence
  source: /note="Description of Artificial Sequence: Synthetic primer"
gagttgatttttgtggaaagg

SEQ ID NO: 249 - DNA, 19 bp, Artificial Sequence
  source: /note="Description of Artificial Sequence: Synthetic primer"
gttacaaaccagtgtgtgc

SEQ ID NO: 250 - DNA, 48 bp, Artificial Sequence
  source: /note="Description of Artificial Sequence: Synthetic primer"
agggacataagtcacatgcaagaagctatcatcttatgtccttccctc

SEQ ID NO: 251 - DNA, 45 bp, Artificial Sequence
  source: /note="Description of Artificial Sequence: Synthetic primer"
acaagaaaagaacttcacaactgctttgaaacaaagacaccttca

SEQ ID NO: 252 - DNA, 19 bp, Artificial Sequence
  source: /note="Description of Artificial Sequence: Synthetic primer"
acaccatgaggtgctgact

SEQ ID NO: 253 - DNA, 24 bp, Artificial Sequence
  source: /note="Description of Artificial Sequence: Synthetic primer"
tgccatttgtcatgatggaaaagc

SEQ ID NO: 254 - DNA, 18 bp, Artificial Sequence
  source: /note="Description of Artificial Sequence: Synthetic primer"
gtgacttatgtccctgca

SEQ ID NO: 255 - DNA, 24 bp, Artificial Sequence
  source: /note="Description of Artificial Sequence: Synthetic primer"
acaattcctattacaacatcacag

SEQ ID NO: 256 - DNA, 42 bp, Artificial Sequence
  source: /note="Description of Artificial Sequence: Synthetic primer"
acgaggaaagtgtgcttttccagaaaagaacttcacaactgc

SEQ ID NO: 257 - DNA, 43 bp, Artificial Sequence
  source: /note="Description of Artificial Sequence: Synthetic primer"
gtttcaaatggcacacactggtacacaaatgtgttgtctgtag

SEQ ID NO: 258 - DNA, 23 bp, Artificial Sequence
  source: /note="Description of Artificial Sequence: Synthetic primer"
ccaatttaatagtgctattggca

SEQ ID NO: 259 - DNA, 18 bp, Artificial Sequence
  source: /note="Description of Artificial Sequence: Synthetic primer"
gcacttcagcctcaactt

SEQ ID NO: 260 - DNA, 47 bp, Artificial Sequence
  source: /note="Description of Artificial Sequence: Synthetic primer"
gcattttggttgaccacatcttgaaaattcaagactcactttcttcc

SEQ ID NO: 261 - DNA, 44 bp, Artificial Sequence
  source: /note="Description of Artificial Sequence: Synthetic primer"
gctttaaacacgcttgttaaacaactgtcaagacgtgaaaggat

SEQ ID NO: 262 - DNA, 22 bp, Artificial Sequence
  source: /note="Description of Artificial Sequence: Synthetic primer"
gttttccaagtgcacttgctgt

SEQ ID NO: 263 - DNA, 22 bp, Artificial Sequence
  source: /note="Description of Artificial Sequence: Synthetic primer"
acaagaaaagaacttcacaact

SEQ ID NO: 264 - DNA, 23 bp, Artificial Sequence
  source: /note="Description of Artificial Sequence: Synthetic primer"
tgacaattcctattacaacatca

SEQ ID NO: 265 - DNA, 43 bp, Artificial Sequence
  source: /note="Description of Artificial Sequence: Synthetic primer"
gtgccatttgaaacaaagacaccttgctcctgccatttgtcat

SEQ ID NO: 266 - DNA, 44 bp, Artificial Sequence
  source: /note="Description of Artificial Sequence: Synthetic primer"
acactggtttgtaacacaaaggacagttaccagacacaaatgtg

SEQ ID NO: 267 - DNA, 24 bp, Artificial Sequence
  source: /note="Description of Artificial Sequence: Synthetic primer"
cacgaggaaagtgtgcttttccat

SEQ ID NO: 268 - DNA, 21 bp, Artificial Sequence
  source: /note="Description of Artificial Sequence: Synthetic primer"
gctattggcaaaattcaagac

SEQ ID NO: 269 - DNA, 18 bp, Artificial Sequence
  source: /note="Description of Artificial Sequence: Synthetic primer"
gcacttcagcctcaactt

SEQ ID NO: 270 - DNA, 40 bp, Artificial Sequence
  source: /note="Description of Artificial Sequence: Synthetic primer"
agcttgtgcattttggttgacctcactttcttccacagca

SEQ ID NO: 271 - DNA, 44 bp, Artificial Sequence
  source: /note="Description of Artificial Sequence: Synthetic primer"
aacacgcttgttaaacaacttagcttgtcaagacgtgaaaggat

SEQ ID NO: 272 - DNA, 20 bp, Artificial Sequence
  source: /note="Description of Artificial Sequence: Synthetic primer"
cttatgtccttccctcagtc

SEQ ID NO: 273 - DNA, 23 bp, Artificial Sequence
  source: /note="Description of Artificial Sequence: Synthetic primer"
tgtagtaatgatttgtggttcat

SEQ ID NO: 274 - DNA, 44 bp, Artificial Sequence
  source: /note="Description of Artificial Sequence: Synthetic primer"
gcaggagcagttgtgaagttctgtagtcttcttgcatgtgactt

SEQ ID NO: 275 - DNA, 43 bp, Artificial Sequence
  source: /note="Description of Artificial Sequence: Synthetic primer"
tgtcatgatggaaaagcacactcctttgtgttacaaaccagtg

SEQ ID NO: 276 - DNA, 25 bp, Artificial Sequence
  source: /note="Description of Artificial Sequence: Synthetic primer"
cgtgaaggtgtctttgtttcaaatg

SEQ ID NO: 277 - DNA, 22 bp, Artificial Sequence
  source: /note="Description of Artificial Sequence: Synthetic primer"
acacagaatgttctctatgaga

SEQ ID NO: 278 - DNA, 25 bp, Artificial Sequence
  source: /note="Description of Artificial Sequence: Synthetic primer"
cgtgaaaggatatcatttaaaacac

SEQ ID NO: 279 - DNA, 46 bp, Artificial Sequence
  source: /note="Description of Artificial Sequence: Synthetic primer"
acttgctgtggaagaaagtgagtattgccaaccaatttaatagtgc

SEQ ID NO: 280 - DNA, 44 bp, Artificial Sequence
  source: /note="Description of Artificial Sequence: Synthetic primer"
ttggaaaacttcaagatgtggtcagcaccaaaattggagctaag

SEQ ID NO: 281 - DNA, 25 bp, Artificial Sequence
  source: /note="Description of Artificial Sequence: Synthetic primer"
tgcacaagctttaaacacgcttgtt

SEQ ID NO: 282 - DNA, 20 bp, Artificial Sequence
  source: /note="Description of Artificial Sequence: Synthetic primer"
tcaagactcactttcttcca

SEQ ID NO: 283 - DNA, 20 bp, Artificial Sequence
  source: /note="Description of Artificial Sequence: Synthetic primer"
atgtctgcaaactttgaagt

SEQ ID NO: 284 - DNA, 41 bp, Artificial Sequence
  source: /note="Description of Artificial Sequence: Synthetic primer"
gcgtgtttaaagcttgtgcatttcagcaagtgcacttggaa

SEQ ID NO: 285 - DNA, 43 bp, Artificial Sequence
  source: /note="Description of Artificial Sequence: Synthetic primer"
tgatatcctttcacgtcttgacaaactgcctgtgatcaaccta

SEQ ID NO: 286 - DNA, 22 bp, Artificial Sequence
  source: /note="Description of Artificial Sequence: Synthetic primer"
ttgaggctgaagtgcaaattga

SEQ ID NO: 287 - DNA, 20 bp, Artificial Sequence
  source: /note="Description of Artificial Sequence: Synthetic primer"
acctcatggtgtagtcttct

SEQ ID NO: 288 - DNA, 21 bp, Artificial Sequence
  source: /note="Description of Artificial Sequence: Synthetic primer"
cacaaatgtgttgtctgtagt

SEQ ID NO: 289-298 - skipped (10 entries)

SEQ ID NO: 299 - DNA, 40 bp, Artificial Sequence
  source: /note="Description of Artificial Sequence: Synthetic primer"
atgacaaatggcaggagcagtgcatgtgacttatgtccct

SEQ ID NO: 300 - DNA, 45 bp, Artificial Sequence
  source: /note="Description of Artificial Sequence: Synthetic primer"
aagcacactttcctcgtgaaggtgtggttcataaaaattcctttg

SEQ ID NO: 301 - DNA, 25 bp, Artificial Sequence
  source: /note="Description of Artificial Sequence: Synthetic primer"
gtttcaaatggcacacactggtttg

SEQ ID NO: 302 - DNA, 23 bp, Artificial Sequence
  source: /note="Description of Artificial Sequence: Synthetic primer"
tcgtgttgttttagatttcatct

SEQ ID NO: 303 - DNA, 18 bp, Artificial Sequence
  source: /note="Description of Artificial Sequence: Synthetic primer"
ttgagtgagagcggtgaa

SEQ ID NO: 304 - DNA, 45 bp, Artificial Sequence
  source: /note="Description of Artificial Sequence: Synthetic primer"
tccaccaaacgtaatgcgggcaaactaaaatgtctgataatggac

SEQ ID NO: 305 - DNA, 44 bp, Artificial Sequence
  source: /note="Description of Artificial Sequence: Synthetic primer"
actggcagtaaccagaatggagcagtattattgggtaaaccttg

SEQ ID NO: 306 - DNA, 21 bp, Artificial Sequence
  source: /note="Description of Artificial Sequence: Synthetic primer"
gtgcatttcgctgattttggg

SEQ ID NO: 307 - DNA, 22 bp, Artificial Sequence
  source: /note="Description of Artificial Sequence: Synthetic primer"
acgaacaaactaaaatgtctga

SEQ ID NO: 308 - DNA, 18 bp, Artificial Sequence
  source: /note="Description of Artificial Sequence: Synthetic primer"
ttgagtgagagcggtgaa

SEQ ID NO: 309 - DNA, 39 bp, Artificial Sequence
  source: /note="Description of Artificial Sequence: Synthetic primer"
tgaatctgagggtccaccaaaatggaccccaaaatcagc

SEQ ID NO: 310 - DNA, 44 bp, Artificial Sequence; identical to SEQ ID NO: 305
  source: /note="Description of Artificial Sequence: Synthetic primer"

SEQ ID NO: 311 - DNA, 20 bp, Artificial Sequence
  source: /note="Description of Artificial Sequence: Synthetic primer"
cgtaatgcggggtgcatttc

SEQ ID NO: 312 - DNA, 23 bp, Artificial Sequence
  source: /note="Description of Artificial Sequence: Synthetic primer"
gatttcatctaaacgaacaaact

SEQ ID NO: 313 - DNA, 21 bp, Artificial Sequence
  source: /note="Description of Artificial Sequence: Synthetic primer"
gggaatttaaggtcttccttg

SEQ ID NO: 314 - DNA, 41 bp, Artificial Sequence
  source: /note="Description of Artificial Sequence: Synthetic primer"
agggtccaccaaacgtaatgcatgtctgataatggacccca

SEQ ID NO: 315 - DNA, 38 bp, Artificial Sequence
  source: /note="Description of Artificial Sequence: Synthetic primer"
ggcgcgatcaaaacaacgtccatgttgagtgagagcgg

SEQ ID NO: 316 - DNA, 25 bp, Artificial Sequence
  source: /note="Description of Artificial Sequence: Synthetic primer"
aaggtttacccaataatactgcgtc

SEQ ID NO: 317 - DNA, 22 bp, Artificial Sequence
  source: /note="Description of Artificial Sequence: Synthetic primer"
acgaacaaactaaaatgtctga

SEQ ID NO: 318 - DNA, 21 bp, Artificial Sequence
  source: /note="Description of Artificial Sequence: Synthetic primer"
cgagggaatttaaggtcttcc

SEQ ID NO: 319 - DNA, 42 bp, Artificial Sequence
  source: /note="Description of Artificial Sequence: Synthetic primer"
ttactgccagttgaatctgagggaccccaaaatcagcgaaat

SEQ ID NO: 320 - DNA, 38 bp, Artificial Sequence
  source: /note="Description of Artificial Sequence: Synthetic primer"
cgatcaaaacaacgtcggccttgccatgttgagtgaga

SEQ ID NO: 321 - DNA, 18 bp, Artificial Sequence
  source: /note="Description of Artificial Sequence: Synthetic primer"
aaacgtaatgcggggtgc

SEQ ID NO: 322 - DNA, 25 bp, Artificial Sequence
  source: /note="Description of Artificial Sequence: Synthetic primer"
caaggtttacccaataatactgcgt

SEQ ID NO: 323 - DNA, 23 bp, Artificial Sequence
  source: /note="Description of Artificial Sequence: Synthetic primer"
actaaaatgtctgataatggacc

SEQ ID NO: 324 - DNA, 20 bp, Artificial Sequence
  source: /note="Description of Artificial Sequence: Synthetic primer"
ctcgagggaatttaaggtct

SEQ ID NO: 325 - DNA, 42 bp, Artificial Sequence
  source: /note="Description of Artificial Sequence: Synthetic primer"
gttactgccagttgaatctgaggccaaaatcagcgaaatgca

SEQ ID NO: 326 - DNA, 38 bp, Artificial Sequence
  source: /note="Description of Artificial Sequence: Synthetic primer"
cgcgatcaaaacaacgtcggccatgttgagtgagagcg

SEQ ID NO: 327 - DNA, 19 bp, Artificial Sequence
  source: /note="Description of Artificial Sequence: Synthetic primer"
caccaaacgtaatgcgggg

SEQ ID NO: 328 - DNA, 25 bp, Artificial Sequence
  source: /note="Description of Artificial Sequence: Synthetic primer"
caaggtttacccaataatactgcgt

SEQ ID NO: 329 - DNA, 22 bp, Artificial Sequence
  source: /note="Description of Artificial Sequence: Synthetic primer"
acgaacaaactaaaatgtctga

SEQ ID NO: 330 - DNA, 19 bp, Artificial Sequence
  source: /note="Description of Artificial Sequence: Synthetic primer"
cctcgagggaatttaaggt

SEQ ID NO: 331 - DNA, 41 bp, Artificial Sequence
  source: /note="Description of Artificial Sequence: Synthetic primer"
ttactgccagttgaatctgagggatggaccccaaaatcagc

SEQ ID NO: 332 - DNA, 39 bp, Artificial Sequence
  source: /note="Description of Artificial Sequence: Synthetic primer"
ggccccaaggtttacccaatcttccttgccatgttgagt

SEQ ID NO: 333 - DNA, 20 bp, Artificial Sequence
  source: /note="Description of Artificial Sequence: Synthetic primer"
cgtaatgcggggtgcatttc

SEQ ID NO: 334 - DNA, 22 bp, Artificial Sequence
  source: /note="Description of Artificial Sequence: Synthetic primer"
aatactgcgtcttggttcaccg

SEQ ID NO: 335 - DNA, 25 bp, Artificial Sequence
  source: /note="Description of Artificial Sequence: Synthetic primer"
caaactaaaatgtctgataatggac

SEQ ID NO: 336 - DNA, 20 bp, Artificial Sequence
  source: /note="Description of Artificial Sequence: Synthetic primer"
ctcgagggaatttaaggtct

SEQ ID NO: 337 - DNA, 42 bp, Artificial Sequence
  source: /note="Description of Artificial Sequence: Synthetic primer"
gttactgccagttgaatctgaggcccaaaatcagcgaaatgc

SEQ ID NO: 338 - DNA, 38 bp, Artificial Sequence
  source: /note="Description of Artificial Sequence: Synthetic primer"
ggccccaaggtttacccaattccttgccatgttgagtg

SEQ ID NO: 339 - DNA, 19 bp, Artificial Sequence
  source: /note="Description of Artificial Sequence: Synthetic primer"
accaaacgtaatgcggggt

SEQ ID NO: 340 - DNA, 21 bp, Artificial Sequence
  source: /note="Description of Artificial Sequence: Synthetic primer"
aatactgcgtcttggttcacc

SEQ ID NO: 341 - DNA, 18 bp, Artificial Sequence
  source: /note="Description of Artificial Sequence: Synthetic primer"
aacacaagctttcggcag

SEQ ID NO: 342 - DNA, 22 bp, Artificial Sequence
  source: /note="Description of Artificial Sequence: Synthetic primer"
tctttgtcatccaatttgatgg

SEQ ID NO: 343 - DNA, 44 bp, Artificial Sequence
  source: /note="Description of Artificial Sequence: Synthetic primer"
cggccaatgtttgtaatcagttcccagaacaaacccaaggaaat

SEQ ID NO: 344 - DNA, 38 bp, Artificial Sequence
  source: /note="Description of Artificial Sequence: Synthetic primer"
gttcttcggaatgtcgcgcacctgtgtaggtcaaccac

SEQ ID NO: 345 - DNA, 22 bp, Artificial Sequence
  source: /note="Description of Artificial Sequence: Synthetic primer"
tgattagttcctggtccccaaa

SEQ ID NO: 346 - DNA, 20 bp, Artificial Sequence
  source: /note="Description of Artificial Sequence: Synthetic primer"
ttggcatggaagtcacacct

SEQ ID NO: 347 - DNA, 18 bp, Artificial Sequence
  source: /note="Description of Artificial Sequence: Synthetic primer"
aacacaagctttcggcag

SEQ ID NO: 348 - DNA, 21 bp, Artificial Sequence
  source: /note="Description of Artificial Sequence: Synthetic primer"
ttggatctttgtcatccaatt

SEQ ID NO: 349 - DNA, 44 bp, Artificial Sequence; identical to SEQ ID NO: 343
  source: /note="Description of Artificial Sequence: Synthetic primer"

SEQ ID NO: 350 - DNA, 38 bp, Artificial Sequence
  source: /note="Description of Artificial Sequence: Synthetic primer"
gttcttcggaatgtcgcgcatgatggcacctgtgtagg

SEQ ID NO: 351 - DNA, 22 bp, Artificial Sequence
  source: /note="Description of Artificial Sequence: Synthetic primer"
tgattagttcctggtccccaaa

SEQ ID NO: 352 - DNA, 20 bp, Artificial Sequence
  source: /note="Description of Artificial Sequence: Synthetic primer"
ttggcatggaagtcacacct

SEQ ID NO: 353 - DNA, 18 bp, Artificial Sequence
  source: /note="Description of Artificial Sequence: Synthetic primer"
tccagaacaaacccaagg

SEQ ID NO: 354 - DNA, 23 bp, Artificial Sequence
  source: /note="Description of Artificial Sequence: Synthetic primer"
atgacttgatctttgaaatttgg

SEQ ID NO: 355 - DNA, 39 bp, Artificial Sequence
  source: /note="Description of Artificial Sequence: Synthetic primer"
gcaatttgcggccaatgtttgaaattttggggaccagga

SEQ ID NO: 356 - DNA, 39 bp, Artificial Sequence
  source: /note="Description of Artificial Sequence: Synthetic primer"
tggcatggaagtcacacctttccaatttgatggcacctg

SEQ ID NO: 357 - DNA, 18 bp, Artificial Sequence
  source: /note="Description of Artificial Sequence: Synthetic primer"
cgggaacgtggttgacct

SEQ ID NO: 358 - DNA, 18 bp, Artificial Sequence
  source: /note="Description of Artificial Sequence: Synthetic primer"
aacacaagctttcggcag

SEQ ID NO: 359 - DNA, 25 bp, Artificial Sequence
  source: /note="Description of Artificial Sequence: Synthetic primer"
gacttgatctttgaaatttggatct

SEQ ID NO: 360 - DNA, 41 bp, Artificial Sequence
  source: /note="Description of Artificial Sequence: Synthetic primer"
tgcggccaatgtttgtaatcagccaaggaaattttggggac

SEQ ID NO: 361 - DNA, 39 bp, Artificial Sequence
  source: /note="Description of Artificial Sequence: Synthetic primer"
tggcatggaagtcacaccttatccaatttgatggcacct

SEQ ID NO: 362 - DNA, 18 bp, Artificial Sequence
  source: /note="Description of Artificial Sequence: Synthetic primer"
cgggaacgtggttgacct

SEQ ID NO: 363 - DNA, 18 bp, Artificial Sequence
  source: /note="Description of Artificial Sequence: Synthetic primer"
aacacaagctttcggcag

SEQ ID NO: 364 - DNA, 22 bp, Artificial Sequence
  source: /note="Description of Artificial Sequence: Synthetic primer"
tctttgtcatccaatttgatgg

SEQ ID NO: 365 - DNA, 42 bp, Artificial Sequence
  source: /note="Description of Artificial Sequence: Synthetic primer"
tgcggccaatgtttgtaatcagcagaacaaacccaaggaaat

SEQ ID NO: 366 - DNA, 38 bp, Artificial Sequence
  source: /note="Description of Artificial Sequence: Synthetic primer"
gttcttcggaatgtcgcgcacacctgtgtaggtcaacc

SEQ ID NO: 367 - DNA, 22 bp, Artificial Sequence
  source: /note="Description of Artificial Sequence: Synthetic primer"
tgattagttcctggtccccaaa

SEQ ID NO: 368 - DNA, 20 bp, Artificial Sequence
  source: /note="Description of Artificial Sequence: Synthetic primer"
ttggcatggaagtcacacct

SEQ ID NO: 369 - DNA, 18 bp, Artificial Sequence
  source: /note="Description of Artificial Sequence: Synthetic primer"
aacacaagctttcggcag

SEQ ID NO: 370 - DNA, 23 bp, Artificial Sequence
  source: /note="Description of Artificial Sequence: Synthetic primer"
gatctttgtcatccaatttgatg

SEQ ID NO: 371 - DNA, 43 bp, Artificial Sequence
  source: /note="Description of Artificial Sequence: Synthetic primer"
cggccaatgtttgtaatcagttccagaacaaacccaaggaaat

SEQ ID NO: 372 - DNA, 38 bp, Artificial Sequence; identical to SEQ ID NO: 344
  source: /note="Description of Artificial Sequence: Synthetic primer"

SEQ ID NO: 373 - DNA, 22 bp, Artificial Sequence
  source: /note="Description of Artificial Sequence: Synthetic primer"
tgattagttcctggtccccaaa

SEQ ID NO: 374 - DNA, 20 bp, Artificial Sequence
  source: /note="Description of Artificial Sequence: Synthetic primer"
ttggcatggaagtcacacct

SEQ ID NO: 375 - DNA, 18 bp, Artificial Sequence
  source: /note="Description of Artificial Sequence: Synthetic primer"
taacacaagctttcggca

SEQ ID NO: 376 - DNA, 22 bp, Artificial Sequence
  source: /note="Description of Artificial Sequence: Synthetic primer"
gaaatttggatctttgtcatcc

SEQ ID NO: 377 - DNA, 40 bp, Artificial Sequence
  source: /note="Description of Artificial Sequence: Synthetic primer"
gcaatttgcggccaatgtttgccaaggaaattttggggac

SEQ ID NO: 378 - DNA, 39 bp, Artificial Sequence
  source: /note="Description of Artificial Sequence: Synthetic primer"
gttcttcggaatgtcgcgcatttgatggcacctgtgtag

SEQ ID NO: 379 - DNA, 25 bp, Artificial Sequence
  source: /note="Description of Artificial Sequence: Synthetic primer"
cagttccttgtctgattagttcctg

SEQ ID NO: 380 - DNA, 20 bp, Artificial Sequence
  source: /note="Description of Artificial Sequence: Synthetic primer"
ttggcatggaagtcacacct

SEQ ID NO: 381 - DNA, 18 bp, Artificial Sequence
  source: /note="Description of Artificial Sequence: Synthetic primer"
aacacaagctttcggcag

SEQ ID NO: 382 - DNA, 23 bp, Artificial Sequence
  source: /note="Description of Artificial Sequence: Synthetic primer"
ctttgaaatttggatctttgtca

SEQ ID NO: 383 - DNA, 41 bp, Artificial Sequence; identical to SEQ ID NO: 360
  source: /note="Description of Artificial Sequence: Synthetic primer"

SEQ ID NO: 384 - DNA, 39 bp, Artificial Sequence; identical to SEQ ID NO: 356
  source: /note="Description of Artificial Sequence: Synthetic primer"

SEQ ID NO: 385 - DNA, 18 bp, Artificial Sequence
  source: /note="Description of Artificial Sequence: Synthetic primer"
cgggaacgtggttgacct

SEQ ID NO: 386 - DNA, 18 bp, Artificial Sequence
  source: /note="Description of Artificial Sequence: Synthetic primer"
aacacaagctttcggcag

SEQ ID NO: 387 - DNA, 22 bp, Artificial Sequence
  source: /note="Description of Artificial Sequence: Synthetic primer"
agcaaaatgacttgatctttga

SEQ ID NO: 388 - DNA, 40 bp, Artificial Sequence
  source: /note="Description of Artificial Sequence: Synthetic primer"
gcaatttgcggccaatgtttaaggaaattttggggaccag

SEQ ID NO: 389 - DNA, 42 bp, Artificial Sequence
  source: /note="Description of Artificial Sequence: Synthetic primer"
atggaagtcacaccttcgggtctttgtcatccaatttgatgg

SEQ ID NO: 390 - DNA, 21 bp, Artificial Sequence
  source: /note="Description of Artificial Sequence: Synthetic primer"
aacgtggttgacctacacagg

SEQ ID NO: 391 - DNA, 18 bp, Artificial Sequence
  source: /note="Description of Artificial Sequence: Synthetic primer"
gaaatctgctgctgaggc

SEQ ID NO: 392 - DNA, 18 bp, Artificial Sequence
  source: /note="Description of Artificial Sequence: Synthetic primer"
aaggtgtgacttccatgc

SEQ ID NO: 393 - DNA, 41 bp, Artificial Sequence
  source: /note="Description of Artificial Sequence: Synthetic primer"
ggtttgttctggaccacgtctaaacgtactgccactaaagc

SEQ ID NO: 394 - DNA, 40 bp, Artificial Sequence
  source: /note="Description of Artificial Sequence: Synthetic primer"
actgattacaaacattggccgcgacattccgaagaacgct

SEQ ID NO: 395 - DNA, 25 bp, Artificial Sequence
  source: /note="Description of Artificial Sequence: Synthetic primer"
gccgaaagcttgtgttacattgtat

SEQ ID NO: 396 - DNA, 19 bp, Artificial Sequence
  source: /note="Description of Artificial Sequence: Synthetic primer"
tcttctcgttcctcatcac

SEQ ID NO: 397 - DNA, 18 bp, Artificial Sequence
  source: /note="Description of Artificial Sequence: Synthetic primer"
cttagaagcctcagcagc

SEQ ID NO: 398 - DNA, 43 bp, Artificial Sequence
  source: /note="Description of Artificial Sequence: Synthetic primer"
tctagcaggagaagttcccctagtagtcgcaacagttcaagaa

SEQ ID NO: 399 - DNA, 41 bp, Artificial Sequence
  source: /note="Description of Artificial Sequence: Synthetic primer"
ctgcttgacagattgaaccagcgtgacagtttggccttgtt

SEQ ID NO: 400 - DNA, 25 bp, Artificial Sequence
  source: /note="Description of Artificial Sequence: Synthetic primer"
aaaatgtctggtaaaggccaacaac

SEQ ID NO: 401 - DNA, 19 bp, Artificial Sequence
  source: /note="Description of Artificial Sequence: Synthetic primer"
agtaggggaacttctcctg

SEQ ID NO: 402 - DNA, 18 bp, Artificial Sequence
  source: /note="Description of Artificial Sequence: Synthetic primer"
ctgccgaaagcttgtgtt

SEQ ID NO: 403 - DNA, 40 bp, Artificial Sequence
  source: /note="Description of Artificial Sequence: Synthetic primer"
gctggttcaatctgtcaagcagtagaatggctggcaatgg

SEQ ID NO: 404 - DNA, 38 bp, Artificial Sequence
  source: /note="Description of Artificial Sequence: Synthetic primer"
gccaacaacaacaaggccaaagtacgtttttgccgagg

SEQ ID NO: 405 - DNA, 18 bp, Artificial Sequence
  source: /note="Description of Artificial Sequence: Synthetic primer"
gcaagagcagcatcaccg

SEQ ID NO: 406 - DNA, 19 bp, Artificial Sequence
  source: /note="Description of Artificial Sequence: Synthetic primer"
agtaggggaacttctcctg

SEQ ID NO: 407 - DNA, 18 bp, Artificial Sequence
  source: /note="Description of Artificial Sequence: Synthetic primer"
ctgccgaaagcttgtgtt

SEQ ID NO: 408 - DNA, 40 bp, Artificial Sequence; identical to SEQ ID NO: 403
  source: /note="Description of Artificial Sequence: Synthetic primer"

SEQ ID NO: 409 - DNA, 40 bp, Artificial Sequence
  source: /note="Description of Artificial Sequence: Synthetic primer"
aacaaggccaaactgtcactaacagtacgtttttgccgag

SEQ ID NO: 410 - DNA, 18 bp, Artificial Sequence
  source: /note="Description of Artificial Sequence: Synthetic primer"
gcaagagcagcatcaccg

SEQ ID NO: 411 - DNA, 18 bp, Artificial Sequence
  source: /note="Description of Artificial Sequence: Synthetic primer"
tcctcatcacgtagtcgc

SEQ ID NO: 412 - DNA, 19 bp, Artificial Sequence
  source: /note="Description of Artificial Sequence: Synthetic primer"
ggcttcttagaagcctcag

SEQ ID NO: 413 - DNA, 44 bp, Artificial Sequence
  source: /note="Description of Artificial Sequence: Synthetic primer"
ccagccattctagcaggagaaaacagttcaagaaattcaactcc

SEQ ID NO: 414 - DNA, 46 bp, Artificial Sequence
  source: /note="Description of Artificial Sequence: Synthetic primer"
ttgacagattgaaccagcttgagacagcagatttcttagtgacagt

SEQ ID NO: 415 - DNA, 18 bp, Artificial Sequence
  source: /note="Description of Artificial Sequence: Synthetic primer"
gttcccctactgctgcct

SEQ ID NO: 416 - DNA, 25 bp, Artificial Sequence
  source: /note="Description of Artificial Sequence: Synthetic primer"
gcaaaatgtctggtaaaggccaaca

SEQ ID NO: 417 - DNA, 18 bp, Artificial Sequence
  source: /note="Description of Artificial Sequence: Synthetic primer"
gcttctacgcagaaggga

SEQ ID NO: 418 - DNA, 18 bp, Artificial Sequence
  source: /note="Description of Artificial Sequence: Synthetic primer"
gtgacagtttggccttgt

SEQ ID NO: 419 - DNA, 42 bp, Artificial Sequence
  source: /note="Description of Artificial Sequence: Synthetic primer"
ctactgctgcctggagttgaattcctcttctcgttcctcatc

SEQ ID NO: 420 - DNA, 38 bp, Artificial Sequence; identical to SEQ ID NO: 81
  source: /note="Description of Artificial Sequence: Synthetic primer"

SEQ ID NO: 421 - DNA, 21 bp, Artificial Sequence
  source: /note="Description of Artificial Sequence: Synthetic primer"
cttgaactgttgcgactacgt

SEQ ID NO: 422 - DNA, 22 bp, Artificial Sequence
  source: /note="Description of Artificial Sequence: Synthetic primer"
attgaaccagcttgagagcaaa

SEQ ID NO: 423 - DNA, 20 bp, Artificial Sequence
  source: /note="Description of Artificial Sequence: Synthetic primer"
gctgcaatcgtgctacaact

SEQ ID NO: 424 - DNA, 20 bp, Artificial Sequence
  source: /note="Description of Artificial Sequence: Synthetic primer"
tttgctctcaagctggttca

SEQ ID NO: 425 - DNA, 42 bp, Artificial Sequence
  source: /note="Description of Artificial Sequence: Synthetic primer"
tgcgactacgtgatgaggaacgttgccaaaaggcttctacgc

SEQ ID NO: 426 - DNA, 42 bp, Artificial Sequence
  source: /note="Description of Artificial Sequence: Synthetic primer"
tctcctgctagaatggctggcatctgtcaagcagcagcaaag

SEQ ID NO: 427 - DNA, 17 bp, Artificial Sequence
  source: /note="Description of Artificial Sequence: Synthetic primer"
ttgactgccgcctctgc

SEQ ID NO: 428 - DNA, 64 bp, Artificial Sequence
  source: /note="Description of Artificial Sequence: Synthetic oligonucleotide"
gatttagactaccccaaaaacgaaggggactaaaactctggtaatttataattataatcagcaa

SEQ ID NO: 429 - DNA, 64 bp, Artificial Sequence
  source: /note="Description of Artificial Sequence: Synthetic oligonucleotide"
gatttagactaccccaaaaacgaaggggactaaaacaaaatcatctggtaatttataattataa

SEQ ID NO: 430 - DNA, 64 bp, Artificial Sequence
  source: /note="Description of Artificial Sequence: Synthetic oligonucleotide"
gatttagactaccccaaaaacgaaggggactaaaacctggtaatttataattataatcagcaat

SEQ ID NO: 431 - DNA, 64 bp, Artificial Sequence
  source: /note="Description of Artificial Sequence: Synthetic oligonucleotide"
gatttagactaccccaaaaacgaaggggactaaaacacacttaaaagtggaaaatgatgcggaa

SEQ ID NO: 432 - DNA, 64 bp, Artificial Sequence
  source: /note="Description of Artificial Sequence: Synthetic oligonucleotide"
gatttagactaccccaaaaacgaaggggactaaaacaaaagtggaaaatgatgcggaattatat

SEQ ID NO: 433 - DNA, 64 bp, Artificial Sequence; identical to SEQ ID NO: 431
  source: /note="Description of Artificial Sequence: Synthetic oligonucleotide"

SEQ ID NO: 434 - DNA, 64 bp, Artificial Sequence
  source: /note="Description of Artificial Sequence: Synthetic oligonucleotide"
gatttagactaccccaaaaacgaaggggactaaaactaaaagtggaaaatgatgcggaattata

SEQ ID NO: 435 - DNA, 64 bp, Artificial Sequence
  source: /note="Description of Artificial Sequence: Synthetic oligonucleotide"
gatttagactaccccaaaaacgaaggggactaaaacgaaagattgctgattataattataaatt

SEQ ID NO: 436 - DNA, 64 bp, Artificial Sequence
  source: /note="Description of Artificial Sequence: Synthetic oligonucleotide"
gatttagactaccccaaaaacgaaggggactaaaactgcgttatagcttggaattctaacaatc

SEQ ID NO: 437 - DNA, 64 bp, Artificial Sequence
  source: /note="Description of Artificial Sequence: Synthetic oligonucleotide"
gatttagactaccccaaaaacgaaggggactaaaacattacaaatgaatctgcatagacattag

SEQ ID NO: 438 - DNA, 64 bp, Artificial Sequence; identical to SEQ ID NO: 428
  source: /note="Description of Artificial Sequence: Synthetic oligonucleotide"

SEQ ID NO: 439 - DNA, 64 bp, Artificial Sequence
  source: /note="Description of Artificial Sequence: Synthetic oligonucleotide"
gatttagactaccccaaaaacgaaggggactaaaaccctgtaaaatcatctggtaatttataat

SEQ ID NO: 440 - DNA, 64 bp, Artificial Sequence
  source: /note="Description of Artificial Sequence: Synthetic oligonucleotide"
gatttagactaccccaaaaacgaaggggactaaaacgcctgtaaaatcatctggtaatttataa

SEQ ID NO: 441 - DNA, 64 bp, Artificial Sequence
  source: /note="Description of Artificial Sequence: Synthetic oligonucleotide"
gatttagactaccccaaaaacgaaggggactaaaacaaagtgtgcttttccatcatgacaaatg

SEQ ID NO: 442 - DNA, 64 bp, Artificial Sequence
  source: /note="Description of Artificial Sequence: Synthetic oligonucleotide"
gatttagactaccccaaaaacgaaggggactaaaacgtgtgcttttccatcatgacaaatggca

SEQ ID NO: 443 - DNA, 64 bp, Artificial Sequence
  source: /note="Description of Artificial Sequence: Synthetic oligonucleotide"
gatttagactaccccaaaaacgaaggggactaaaactggttcataaaaattcctttgtgttaca

SEQ ID NO: 444 - DNA, 64 bp, Artificial Sequence
  source: /note="Description of Artificial Sequence: Synthetic oligonucleotide"
gatttagactaccccaaaaacgaaggggactaaaacatttgtggttcataaaaattcctttgtg

SEQ ID NO: 445 - DNA, 64 bp, Artificial Sequence
  source: /note="Description of Artificial Sequence: Synthetic oligonucleotide"
gatttagactaccccaaaaacgaaggggactaaaaccatttaaaacacttgaaattgcaccaaa

SEQ ID NO: 446 - DNA, 64 bp, Artificial Sequence
  source: /note="Description of Artificial Sequence: Synthetic oligonucleotide"
gatttagactaccccaaaaacgaaggggactaaaacaaacacttgaaattgcaccaaaattgga

SEQ ID NO: 447 - DNA, 64 bp, Artificial Sequence
  source: /note="Description of Artificial Sequence: Synthetic oligonucleotide"
gatttagactaccccaaaaacgaaggggactaaaactctgtagtaatgatttgtggttcataaa

SEQ ID NO: 448 - DNA, 64 bp, Artificial Sequence
  source: /note="Description of Artificial Sequence: Synthetic oligonucleotide"
gatttagactaccccaaaaacgaaggggactaaaactgatggaaaagcacactttcctcgtgaa

SEQ ID NO: 449 - DNA, 64 bp, Artificial Sequence
  source: /note="Description of Artificial Sequence: Synthetic oligonucleotide"
gatttagactaccccaaaaacgaaggggactaaaacaagtgcacttggaaaacttcaagatgtg

SEQ ID NO: 450 - DNA, 64 bp, Artificial Sequence; identical to SEQ ID NO: 445
  source: /note="Description of Artificial Sequence: Synthetic oligonucleotide"

SEQ ID NO: 451 - DNA, 64 bp, Artificial Sequence
  source: /note="Description of Artificial Sequence: Synthetic oligonucleotide"
gatttagactaccccaaaaacgaaggggactaaaacccatttgaaacaaagacaccttcacgag

SEQ ID NO: 452 - DNA, 64 bp, Artificial Sequence
  source: /note="Description of Artificial Sequence: Synthetic oligonucleotide"
gatttagactaccccaaaaacgaaggggactaaaacgtgccatttgaaacaaagacaccttcac

SEQ ID NO: 453 - DNA, 64 bp, Artificial Sequence
  source: /note="Description of Artificial Sequence: Synthetic oligonucleotide"
gatttagactaccccaaaaacgaaggggactaaaacacaagcgtgtttaaagcttgtgcatttt

SEQ ID NO: 454 - DNA, 64 bp, Artificial Sequence
  source: /note="Description of Artificial Sequence: Synthetic oligonucleotide"
gatttagactaccccaaaaacgaaggggactaaaacgcaccaaaattggagctaagttgtttaa

SEQ ID NO: 455 - DNA, 64 bp, Artificial Sequence
  source: /note="Description of Artificial Sequence: Synthetic oligonucleotide"
gatttagactaccccaaaaacgaaggggactaaaactgaaattgcaccaaaattggagctaagt

SEQ ID NO: 456 - DNA, 64 bp, Artificial Sequence
  source: /note="Description of Artificial Sequence: Synthetic oligonucleotide"
gatttagactaccccaaaaacgaaggggactaaaacccagtgtgtgccatttgaaacaaagaca

SEQ ID NO: 457 - DNA, 64 bp, Artificial Sequence
  source: /note="Description of Artificial Sequence: Synthetic oligonucleotide"
gatttagactaccccaaaaacgaaggggactaaaacacaaaccagtgtgtgccatttgaaacaa

SEQ ID NO: 458 - DNA, 64 bp, Artificial Sequence
  source: /note="Description of Artificial Sequence: Synthetic oligonucleotide"
gatttagactaccccaaaaacgaaggggactaaaacccgacgttgttttgatcgcgccccactg

SEQ ID NO: 459 - DNA, 64 bp, Artificial Sequence
  source: /note="Description of Artificial Sequence: Synthetic oligonucleotide"
gatttagactaccccaaaaacgaaggggactaaaacgtggggcgcgatcaaaacaacgtcggcc

SEQ ID NO: 460 - DNA, 64 bp, Artificial Sequence
  source: /note="Description of Artificial Sequence: Synthetic oligonucleotide"
gatttagactaccccaaaaacgaaggggactaaaacgaacgcagtggggcgcgatcaaaacaac

SEQ ID NO: 461 - DNA, 64 bp, Artificial Sequence
  source: /note="Description of Artificial Sequence: Synthetic oligonucleotide"
gatttagactaccccaaaaacgaaggggactaaaacggcagtaaccagaatggagaacgcagtg

SEQ ID NO: 462 - DNA, 64 bp, Artificial Sequence
  source: /note="Description of Artificial Sequence: Synthetic oligonucleotide"
gatttagactaccccaaaaacgaaggggactaaaaccgccccactgcgttctccattctggtta

SEQ ID NO: 463 - DNA, 64 bp, Artificial Sequence
  source: /note="Description of Artificial Sequence: Synthetic oligonucleotide"
gatttagactaccccaaaaacgaaggggactaaaacgctgaagcgctgggggcaaattgtgcaa

SEQ ID NO: 464 - DNA, 64 bp, Artificial Sequence
  source: /note="Description of Artificial Sequence: Synthetic oligonucleotide"
gatttagactaccccaaaaacgaaggggactaaaacgaagcgctgggggcaaattgtgcaattt

SEQ ID NO: 465 - DNA, 64 bp, Artificial Sequence
  source: /note="Description of Artificial Sequence: Synthetic oligonucleotide"
gatttagactaccccaaaaacgaaggggactaaaaccaatttgcccccagcgcttcagcgttct

SEQ ID NO: 466 - DNA, 64 bp, Artificial Sequence
  source: /note="Description of Artificial Sequence: Synthetic oligonucleotide"
gatttagactaccccaaaaacgaaggggactaaaaccccccagcgcttcagcgttcttcggaat

SEQ ID NO: 467 - DNA, 64 bp, Artificial Sequence
  source: /note="Description of Artificial Sequence: Synthetic oligonucleotide"
gatttagactaccccaaaaacgaaggggactaaaacaaattgcacaatttgcccccagcgcttc

SEQ ID NO: 468 - DNA, 64 bp, Artificial Sequence
  source: /note="Description of Artificial Sequence: Synthetic oligonucleotide"
gatttagactaccccaaaaacgaaggggactaaaacaatggcggtgatgctgctcttgctttgc

SEQ ID NO: 469 - DNA, 64 bp, Artificial Sequence
  source: /note="Description of Artificial Sequence: Synthetic oligonucleotide"
gatttagactaccccaaaaacgaaggggactaaaacgcaaagcaagagcagcatcaccgccatt

SEQ ID NO: 470 - DNA, 64 bp, Artificial Sequence
  source: /note="Description of Artificial Sequence: Synthetic oligonucleotide"
gatttagactaccccaaaaacgaaggggactaaaactgagagcaaaatgtctggtaaaggccaa

SEQ ID NO: 471 - DNA, 64 bp, Artificial Sequence; identical to SEQ ID NO: 84
  source: /note="Description of Artificial Sequence: Synthetic oligonucleotide"

SEQ ID NO: 472 - DNA, 64 bp, Artificial Sequence
  source: /note="Description of Artificial Sequence: Synthetic oligonucleotide"
gatttagactaccccaaaaacgaaggggactaaaacgcagcagcaaagcaagagcagcatcacc

SEQ ID NO: 473 - DNA, 64 bp, Artificial Sequence
  source: /note="Description of Artificial Sequence: Synthetic oligonucleotide"
gatttagactaccccaaaaacgaaggggactaaaactgacaaatgttaaaaacactattagcat

SEQ ID NO: 474 - DNA, 64 bp, Artificial Sequence
  source: /note="Description of Artificial Sequence: Synthetic oligonucleotide"
gatttagactaccccaaaaacgaaggggactaaaacaatgttaaaaacactattagcataagca

SEQ ID NO: 475 - DNA, 64 bp, Artificial Sequence
  source: /note="Description of Artificial Sequence: Synthetic oligonucleotide"
gatttagactaccccaaaaacgaaggggactaaaaccaaatgttaaaaacactattagcataag

SEQ ID NO: 476 - DNA, 64 bp, Artificial Sequence
  source: /note="Description of Artificial Sequence: Synthetic oligonucleotide"
gatttagactaccccaaaaacgaaggggactaaaactgacagcttgacaaatgttaaaaacact

SEQ ID NO: 477 - DNA, 64 bp, Artificial Sequence
  source: /note="Description of Artificial Sequence: Synthetic oligonucleotide"
gatttagactaccccaaaaacgaaggggactaaaaccgtgacagcttgacaaatgttaaaaaca

SEQ ID NO: 478 - DNA, 64 bp, Artificial Sequence
  source: /note="Description of Artificial Sequence: Synthetic oligonucleotide"
gatttagactaccccaaaaacgaaggggactaaaactgttgtagcttgtcacaccgtttctata

SEQ ID NO: 479 - DNA, 64 bp, Artificial Sequence
  source: /note="Description of Artificial Sequence: Synthetic oligonucleotide"
gatttagactaccccaaaaacgaaggggactaaaaccatctcctgatgaggttccacctggttt

SEQ ID NO: 480 - DNA, 64 bp, Artificial Sequence
  source: /note="Description of Artificial Sequence: Synthetic oligonucleotide"
gatttagactaccccaaaaacgaaggggactaaaacctcctgatgaggttccacctggtttaac

SEQ ID NO: 481 - DNA, 64 bp, Artificial Sequence
  source: /note="Description of Artificial Sequence: Synthetic oligonucleotide"
gatttagactaccccaaaaacgaaggggactaaaactagcataagcagttgtggcatctcctga

SEQ ID NO: 482 - DNA, 64 bp, Artificial Sequence
  source: /note="Description of Artificial Sequence: Synthetic oligonucleotide"
gatttagactaccccaaaaacgaaggggactaaaactagaaacggtgtgacaagctacaacacg

SEQ ID NO: 483 - DNA, 64 bp, Artificial Sequence
  source: /note="Description of Artificial Sequence: Synthetic oligonucleotide"
gatttagactaccccaaaaacgaaggggactaaaacacggtgtgacaagctacaacacgttgta

SEQ ID NO: 484 - DNA, 64 bp, Artificial Sequence; identical to SEQ ID NO: 479
  source: /note="Description of Artificial Sequence: Synthetic oligonucleotide"

SEQ ID NO: 485 - DNA, 64 bp, Artificial Sequence
  source: /note="Description of Artificial Sequence: Synthetic oligonucleotide"
gatttagactaccccaaaaacgaaggggactaaaaccctgatgaggttccacctggtttaacat

SEQ ID NO: 486 - DNA, 64 bp, Artificial Sequence; identical to SEQ ID NO: 485
  source: /note="Description of Artificial Sequence: Synthetic oligonucleotide"

SEQ ID NO: 487 - DNA, 64 bp, Artificial Sequence
  source: /note="Description of Artificial Sequence: Synthetic oligonucleotide"
gatttagactaccccaaaaacgaaggggactaaaactgaggttccacctggtttaacatatagt

SEQ ID NO: 488 - DNA, 64 bp, Artificial Sequence; identical to SEQ ID NO: 473
  source: /note="Description of Artificial Sequence: Synthetic oligonucleotide"

SEQ ID NO: 489 - DNA, 64 bp, Artificial Sequence; identical to SEQ ID NO: 474
  source: /note="Description of Artificial Sequence: Synthetic oligonucleotide"

SEQ ID NO: 490 - DNA, 64 bp, Artificial Sequence; identical to SEQ ID NO: 476
  source: /note="Description of Artificial Sequence: Synthetic oligonucleotide"

SEQ ID NO: 491 - DNA, 64 bp, Artificial Sequence
  source: /note="Description of Artificial Sequence: Synthetic oligonucleotide"
gatttagactaccccaaaaacgaaggggactaaaaccagcttgacaaatgttaaaaacactatt

SEQ ID NO: 492 - DNA, 64 bp, Artificial Sequence
  source: /note="Description of Artificial Sequence: Synthetic oligonucleotide"
gatttagactaccccaaaaacgaaggggactaaaacaatcaaatccaatagaatgatgccaaca

SEQ ID NO: 493 - DNA, 64 bp, Artificial Sequence
  source: /note="Description of Artificial Sequence: Synthetic oligonucleotide"
gatttagactaccccaaaaacgaaggggactaaaacatcaaatccaatagaatgatgccaacag

SEQ ID NO: 494 - DNA, 64 bp, Artificial Sequence
  source: /note="Description of Artificial Sequence: Synthetic oligonucleotide"
gatttagactaccccaaaaacgaaggggactaaaactaatcaaatccaatagaatgatgccaac

SEQ ID NO: 495 - DNA, 64 bp, Artificial Sequence
  source: /note="Description of Artificial Sequence: Synthetic oligonucleotide"
gatttagactaccccaaaaacgaaggggactaaaacacacgcttaacaaagcactcgtggacag

SEQ ID NO: 496 - DNA, 64 bp, Artificial Sequence
  source: /note="Description of Artificial Sequence: Synthetic oligonucleotide"
gatttagactaccccaaaaacgaaggggactaaaaccgcttaacaaagcactcgtggacagcta

SEQ ID NO: 497 - DNA, 64 bp, Artificial Sequence
  source: /note="Description of Artificial Sequence: Synthetic oligonucleotide"
gatttagactaccccaaaaacgaaggggactaaaacccgcattaatcttcagttcatcaccaat

SEQ ID NO: 498 - DNA, 64 bp, Artificial Sequence
  source: /note="Description of Artificial Sequence: Synthetic oligonucleotide"
gatttagactaccccaaaaacgaaggggactaaaacacaagccgcattaatcttcagttcatca

SEQ ID NO: 499 - DNA, 64 bp, Artificial Sequence
  source: /note="Description of Artificial Sequence: Synthetic oligonucleotide"
gatttagactaccccaaaaacgaaggggactaaaacacacctagtcatgattgcatcacaacta

SEQ ID NO: 500 - DNA, 64 bp, Artificial Sequence
  source: /note="Description of Artificial Sequence: Synthetic oligonucleotide"
gatttagactaccccaaaaacgaaggggactaaaacagacacctagtcatgattgcatcacaac

SEQ ID NO: 501 - DNA, 64 bp, Artificial Sequence
  source: /note="Description of Artificial Sequence: Synthetic oligonucleotide"
gatttagactaccccaaaaacgaaggggactaaaaccagctagacacctagtcatgattgcatc

SEQ ID NO: 502 - DNA, 64 bp, Artificial Sequence
  source: /note="Description of Artificial Sequence: Synthetic oligonucleotide"
gatttagactaccccaaaaacgaaggggactaaaacacctacaaagcaaccatgatctgtattg

SEQ ID NO: 503 - DNA, 64 bp, Artificial Sequence; identical to SEQ ID NO: 495
  source: /note="Description of Artificial Sequence: Synthetic oligonucleotide"

SEQ ID NO: 504 - DNA, 64 bp, Artificial Sequence
  source: /note="Description of Artificial Sequence: Synthetic oligonucleotide"
gatttagactaccccaaaaacgaaggggactaaaacacgcttaacaaagcactcgtggacagct

SEQ ID NO: 505 - DNA, 64 bp, Artificial Sequence
  source: /note="Description of Artificial Sequence: Synthetic oligonucleotide"
gatttagactaccccaaaaacgaaggggactaaaactcacaactagctacatgtgcattaccat

SEQ ID NO: 506 - DNA, 64 bp, Artificial Sequence
  source: /note="Description of Artificial Sequence: Synthetic oligonucleotide"
gatttagactaccccaaaaacgaaggggactaaaaccacaactagctacatgtgcattaccatg

SEQ ID NO: 507 - DNA, 64 bp, Artificial Sequence
  source: /note="Description of Artificial Sequence: Synthetic oligonucleotide"
gatttagactaccccaaaaacgaaggggactaaaacatttgattacgtctataatccgtttatg

SEQ ID NO: 508 - DNA, 64 bp, Artificial Sequence; identical to SEQ ID NO: 77
  source: /note="Description of Artificial Sequence: Synthetic oligonucleotide"

SEQ ID NO: 509 - DNA, 64 bp, Artificial Sequence
  source: /note="Description of Artificial Sequence: Synthetic oligonucleotide"
gatttagactaccccaaaaacgaaggggactaaaaccagatcatggttgctttgtaggttacct

SEQ ID NO: 510 - DNA, 64 bp, Artificial Sequence
  source: /note="Description of Artificial Sequence: Synthetic oligonucleotide"
gatttagactaccccaaaaacgaaggggactaaaacgcttttccactgcttcagacacttatgc

SEQ ID NO: 511 - DNA, 64 bp, Artificial Sequence
  source: /note="Description of Artificial Sequence: Synthetic oligonucleotide"
gatttagactaccccaaaaacgaaggggactaaaacattataggatattcaatagtccagtcaa

SEQ ID NO: 512 - DNA, 64 bp, Artificial Sequence
  source: /note="Description of Artificial Sequence: Synthetic oligonucleotide"
gatttagactaccccaaaaacgaaggggactaaaacccaattataggatattcaatagtccagt

SEQ ID NO: 513 - DNA, 64 bp, Artificial Sequence
  source: /note="Description of Artificial Sequence: Synthetic oligonucleotide"
gatttagactaccccaaaaacgaaggggactaaaacgctttaacaaccatgtgttgaacctttc

SEQ ID NO: 514 - DNA, 64 bp, Artificial Sequence
  source: /note="Description of Artificial Sequence: Synthetic oligonucleotide"
gatttagactaccccaaaaacgaaggggactaaaacgcagctttaacaaccatgtgttgaacct

SEQ ID NO: 515 - DNA, 64 bp, Artificial Sequence
  source: /note="Description of Artificial Sequence: Synthetic oligonucleotide"
gatttagactaccccaaaaacgaaggggactaaaacctttaacaaccatgtgttgaacctttct

SEQ ID NO: 516 - DNA, 64 bp, Artificial Sequence
  source: /note="Description of Artificial Sequence: Synthetic oligonucleotide"
gatttagactaccccaaaaacgaaggggactaaaacacctcatggtcatgttatggttgagctg

SEQ ID NO: 517 - DNA, 64 bp, Artificial Sequence
  source: /note="Description of Artificial Sequence: Synthetic oligonucleotide"
gatttagactaccccaaaaacgaaggggactaaaaccagctcaaccataacatgaccatgaggt

SEQ ID NO: 518 - DNA, 64 bp, Artificial Sequence
  source: /note="Description of Artificial Sequence: Synthetic oligonucleotide"
gatttagactaccccaaaaacgaaggggactaaaactggtcatgttatggttgagctggtagca

SEQ ID NO: 519 - DNA, 64 bp, Artificial Sequence
  source: /note="Description of Artificial Sequence: Synthetic oligonucleotide"
gatttagactaccccaaaaacgaaggggactaaaactgctaccagctcaaccataacatgacca

SEQ ID NO: 520 - DNA, 64 bp, Artificial Sequence
  source: /note="Description of Artificial Sequence: Synthetic oligonucleotide"
gatttagactaccccaaaaacgaaggggactaaaaccgaactgcacctcatggtcatgttatgg

SEQ ID NO: 521 - DNA, 64 bp, Artificial Sequence
  source: /note="Description of Artificial Sequence: Synthetic oligonucleotide"
gatttagactaccccaaaaacgaaggggactaaaacccataacatgaccatgaggtgcagttcg

SEQ ID NO: 522 - DNA, 64 bp, Artificial Sequence
  source: /note="Description of Artificial Sequence: Synthetic oligonucleotide"
gatttagactaccccaaaaacgaaggggactaaaacgcaccccgcattacgtttggtggaccct

SEQ ID NO: 523 - DNA, 64 bp, Artificial Sequence
  source: /note="Description of Artificial Sequence: Synthetic oligonucleotide"
gatttagactaccccaaaaacgaaggggactaaaacagggtccaccaaacgtaatgcggggtgc

SEQ ID NO: 524 - DNA, 64 bp, Artificial Sequence
  source: /note="Description of Artificial Sequence: Synthetic oligonucleotide"
gatttagactaccccaaaaacgaaggggactaaaactgcacaatttgcccccagcgcttcagcg

SEQ ID NO: 525 - DNA, 64 bp, Artificial Sequence
  source: /note="Description of Artificial Sequence: Synthetic oligonucleotide"
gatttagactaccccaaaaacgaaggggactaaaaccgctgaagcgctgggggcaaattgtgca

SEQ ID NO: 526 - DNA, 64 bp, Artificial Sequence
  source: /note="Description of Artificial Sequence: Synthetic oligonucleotide"
gatttagactaccccaaaaacgaaggggactaaaacatcacattggcacccgcaatcctgctaa

SEQ ID NO: 527 - DNA, 64 bp, Artificial Sequence
  source: /note="Description of Artificial Sequence: Synthetic oligonucleotide"
gatttagactaccccaaaaacgaaggggactaaaacttagcaggattgcgggtgccaatgtgat

SEQ ID NO: 528 - DNA, 47 bp, Artificial Sequence
  source: /note="Description of Artificial Sequence: Synthetic primer"
gaaattaatacgactcactatagggtgattagttcctggtccccaaa

SEQ ID NO: 529 - DNA, 44 bp, Artificial Sequence
  source: /note="Description of Artificial Sequence: Synthetic primer"
gaaattaatacgactcactatagggacaccatgaggtgctgact

SEQ ID NO: 530 - protein, 1263 aa, Unknown
  source: /note="Description of Unknown: Cas12 sequence"
MEDYSGFVNIYSIQKTLRFELKPVGKTLEHIEKKGFLKKDKIRAEDYKAVKKIIDKYHRAYIEEVFDSVLHQKKKKDKTRFSTQFIKEIKEFSELYYKTEKNIPDKERLEALSEKLRKMLVGAFKGEFSEEVAEKYKNLFSKELIRNEIEKFCETDEERKQVSNFKSFTTYFTGFHSNRQNIYSDEKKSTAIGYRIIHQNLPKFLDNLKIIESIQRRFKDFPWSDLKKNLKKIDKNIKLTEYFSIDGFVNVLNQKGIDAYNTILGGKSEESGEKIQGLNEYINLYRQKNNIDRKNLPNVKILFKQILGDRETKSFIPEAFPDDQSVLNSITEFAKYLKLDKKKKSIIAELKKFLSSFNRYELDGIYLANDNSLASISTFLFDDWSFIKKSVSFKYDESVGDPKKKIKSPLKYEKEKEKWLKQKYYTISFLNDAIESYSKSQDEKRVKIRLEAYFAEFKSKDDAKKQFDLLERIEEAYAIVEPLLGAEYPRDRNLKADKKEVGKIKDFLDSIKSLQFFLKPLLSAEIFDEKDLGFYNQLEGYYEEIDSIGHLYNKVRNYLTGKIYSKEKFKLNFENSTLLKGWDENREVANLCVIFREDQKYYLGVMDKENNTILSDIPKVKPNELFYEKMVYKLIPTPHMQLPRIIFSSDNLSIYNPSKSILKIREAKSFKEGKNFKLKDCHKFIDFYKESISKNEDWSRFDFKFSKTSSYENISEFYREVERQGYNLDFKKVSKFYIDSLVEDGKLYLFQIYNKDFSIFSKGKPNLHTIYFRSLFSKENLKDVCLKLNGEAEMFFRKKSINYDEKKKREGHHPELFEKLKYPILKDKRYSEDKFQFHLPISLNFKSKERLNFNLKVNEFLKRNKDINIIGIDRGERNLLYLVMINQKGEILKQTLLDSMQSGKGRPEINYKEKLQEKEIERDKARKSWGTVENIKELKEGYLSIVIHQISKLMVENNAIVVLEDLNIGFKRGRQKVERQVYQKFEKMLIDKLNFLVFKENKPTEPGGVLKAYQLTDEFQSFEKLSKQTGFLFYVPSWNTSKIDPRTGFIDFLHPAYENIEKAKQWINKFDSIRFNSKMDWFEFTADTRKFSENLMLGKNRVWVICTTNVERYFTSKTANSSIQYNSIQITEKLKELFVDIPFSNGQDLKPEILRKNDAVFFKSLLFYIKTTLSLRQNNGKKGEEEKDFILSPVVDSKGRFFNSLEASDDEPKDADANGAYHIALKGLMNLLVLNETKEENLSRPKWKIKNKDWLEFVWERNR

SEQ ID NO: 531 - protein, 1222 aa, Unknown
  source: /note="Description of Unknown: Cas12 sequence"
MKKFTNLYSLSKTLRFELIPQGKTLENIQKSGILEQDNSRAEKYEKIKKIIDDYHKFFIEKSFTGKKIDDYFLNQYFELFKIKDKDEEQKKDFKSIQENLRKNIISFFDKNKLKRLFEKEIIKEDLPNFVKEEEDKKLISEFDKFTTYFVGFHENRKSMYSEEEKSTSIAYRTINENLPKFINNIFVFEKISKTPISENFRELYKDLEEYLNVNDIQDIFKLNYFSNVITQKQIDVYNLVIGGKTLENGTKIKGLNEYINLYNQNQTDKKNKLPLLTVLFKQILCDRDTISFLPEQFENDIDVLDNIKNTYSNMEKSIKDIKDLLSNLKDFDLSKIYITNDIALTDISQQVFNNYSIIINAIKENIKKENPKKKTENEEKYGERIDKIFKSNNSFSIKYINDCIKEKNIEIYFMDFGKKENNKKVKNLFDELQNNYSMVKDLLEYKKIQSLIQDEKSIELIKNFLDSIKNIQHFLKPLYVKDNDIVKDISFYRDFEELYLNIDKITPLYNKVRNYVTQKPYSVKKIKLNFENSTLLAGWDLNKERDNTCAILRKDDLYYLAIMDVNNRNVFNEKGIDGIGYEKMEYKLLPGANKMLPKVFFSKSRIKDFNPSEQIIRNYEKETHKKGSNFSLKDCHKLIDFFKSSINKHEDWKNFNFKFSNTDKYEDLSGFYREVEQQGYKITFRNISKEYVDKLVEEGKIYLFQIYNKDFSKYSKGTPNMHTLYWKALFDEDNLKNVVYKLNGQAEIFYRKGSIEKENIVIHKANNAIENKNMDNKKKQSKFEYDIIKDRRYTVDKFQFHVPITLNFKAIGNERINEQVNQYIKDNNIKHIIGIDRGERHLLFLSLIDLKGNIIKQFSLNEIVNEYNGNSYKTNYHMLLEKREEERDKARKSWKTIENIKELKEGYISQVIHKITQLMIEYNAIVVLEDLNFGFMRGRQKVEKQVYQKFEKMLIDKLNYLVDKKKDKNEAGGLLKAHQLTNKFESFQKMGKQNGFLFYIPAWNTSKLDPITGFVNLFDTHYTNVDNAKKFFENFEDIRFNEKKNYFEFIVNDYTKFNTKAEGTKLNWTICSNEDRIKTFRSSSKNNQWVSETVNLTDSLIELFKKYDIDYKLELKEQIISKSEKNFFETLLYLFKLTLQMRNSITGTETDYLISPVADKTGNFFDSRKGIENLPNNADANGAYNIARKGLWVIEQIKKAKDLKKVKLAISNKEWLQFVQGK

SEQ ID NO: 532 - protein, 1262 aa, Unknown
  source: /note="Description of Unknown: Cas12 sequence"
MAKNTIFSQFTGLYPVSKTLRFELKPMGKTLEKIKETGVIENDKKRHNDYFDAKKIIDKYHKYFIDAALSKFPRIDWSPLKEAIERSLDRSDASKKKLEKTQTEFRKKIAKALTTHDHYKELTASTPKDLFLKVFPDHFGKQPAIDTFDGFSSYFTGFQENRQNIYSDEAISTAIPYRLVHDNFPKFLSNIEVYKTLKDNAPSVLSDAENELRDFLNGKSLANIFELNAYNEVLTQSGIDFFNQVIGGISDEGGEKKTRGINEFSNLYRQQHPEFAQKRLATKMIPLYKQILSDRETKSFILESYSNDSQVQNSVKEFFESQILNWDIAGRRVNVLNELTSLVKRISEFDLGNIYVNQEELSNISLKLFDNWNSINGLLFKHAENRIGSAEKSANKKKIDAWMKNKEFSIATLNLAIAESNSEEISRVKIESYWNNFEAKVQSILCGDNRRNLDEFISATFNENNALREDSKIIEKLKAFLDALIEIMHSIKPLISDAENRDLSFYNELIPLYDQLSLVVPLYNKIRNYATQKLTESEKFKLNFDNPTLADGWDQNKEEANTAILLLKNGLYYLGIMNAKNKPKIKDFKTSESEDCYDKMVYKLLPGPNKMLPKVFFSEKGLATFKPPKDILDGYNAGKHKKGDLFDIGFCHQLIDFFKESIAKHPDWKKFDFNFSDTSSYEDISGFYKEVTDQGYKITFSKIPTSQIDEWVKEGKLFLFQIYNKDFAPGAKGSPNLHTLYWKSVFSPENLKDVVVKLNGEAELFYRPSSVKKPYSHKVGEKLVNRIGKDGLPLPESVFGELFRYFNGKLEGELSDEAKRYLDVAVVKDVKHEIVKDRRYTQDKFEFHVPLTLNFKADSKNEYMNERVRHFLKDNPDVNIIGIDRGERHLLYMTLINQKGEILKQKSFNVVESVNYQAKLVQREKERDAARRSWSSVGKIKDLKEGFLSQVIHEITTTMIENNAIVVLEDLNFGFKRGRFCVERQVYQKFEKMLIDKLNYLVFKNKPEGDVGGVLKGYQLAEKFDSFQKLGKQSGFLFYIPAAYTSKIDPTTGFANLFNMTELTSAEKKKEFLSHFEDITYDGKNDRFLFSFDYKNFKCFQTDYIKKWTVYSQGKRIVYDKESKSAKEISPVEIIKAALAKQNIALTDQLDVLSAINSVEASPKSASFFGDICYAFEKTLQMRNSIPNTDEDYLASPVMNKRGEFYDSRSCDDALPQNADANGAYHIALKGLYLIKNVFDAGGKELKISHEDWFKFAQSRNC

SEQ ID NO: 533 - protein, 1253 aa, Unknown
  source: /note="Description of Unknown: Cas12 sequence"
MSKGKIWENFINQYSVSKTLRFELKPVGKTLENINAKGLIEEDEQRAEDYKKAKKIIDEYHKYFIEGALGSCSLDLNILNEFLQLYNKAQKTDADKKEYEKIQTTLRKNIAESFGKNADKKTKEQYENLFKKELLRNDLPDWVEDEEDAKIIERFKTFTTYFTGFHENRKNIYDNEEKSTAIGYRIVHENLPKFIDNMNAFEKISKALDLSEIDRDFQSELGEIKAEEFFTIEFFNQCLNQFGIDRYNTLLGGISEGENIKKKQGLNERINLYNQQLKGERKKERLPKLKVLYKQILSDSSSHSFSIDEFENDNELLESLEIFYKNELIGFNHSGVDSNIFDLVKDLLLKIDESEQSSIYLKNDKGLTEISQRIFGDWNIIKSALEEYYDEHYPPKKDTFNKKELDERSRWLKENHSIGVIEKALANYENEIVREHLKQNSAPIVSYFKSLEVDGENLIDKIYSAYGNISDLLNSSYPDEKKLVSDRTSKDKIKVFLDSLMSLLHFLKPLDVKDLGNKDSAFYGDYDFIVEQLSKLVRLYNKTRNYLTRKPYSIEKIKLNFENSTLLAGWDVNKERDNNCVIFKRQDGDRELFYLGIMDKSHNKIFTKIEEAKSDDVYQKMNYKLLPGPNKMLPKVFFSKKSIDFYAPGEELLKNYKNGTHKKGENFNLQHCHELIDFFKRSINKHEDWSQFNFKFSDTSEYEDTSFFFKEVSQQGYSITFKNIDRETIEKFVDEGKLYLFQIYNKDFSPKSKGRPNLHTLYWKMLFDERNLANTVYQLNGEAEVFYRKKSISEKDRVVHRADEPIGLKNSENSAQKSLFPYDIVKDRRFTVDKFQFHVPITLNFKSEGNERLNISVNKFLKDNPDVNIIGLDRGERHLIYLTLINQKGEILHQESLNEVMGVNYQQKLHRVEKDRTEERRNWDRIENIKELKSGYLSQVVHKISQLMVEYNAIVVMEDLNFGFKRGRIKVEKQVYQKFEKTLIDKLNYLVFKDREPEEPAGVLNALQLTNKFESFKKLGKQCGFLFYVTSDYTSKIDPATGFVNLLYPKYESVEKSQNFFRKFDNICFNSGAGYFEFDFDYSNFTDRADGTRTRWKVCTVGNERFGYNPKTKASETVNVTESLKELLLQHEIAFENGESLVESISKNTTKYFHKSLLNFLRLTLTLRHSKTGTDIDYILSPVANEEGVFFDSRNASDKMPKDADANGAYNVALKGLMVLERINAAEDLSQFKFKDMSIKNKDWLKFVQDRQG

SEQ ID NO: 534 - protein, 1271 aa, Unknown
  source: /note="Description of Unknown: Cas12 sequence"
MKNLANFTNLYSLQKTLRFELKPIGKTLDWIIKKDLLKQDEILAEDYKIVKKIIDRYHKDFIDLAFESAYLQKKSSDSFTAIMEASIQSYSELYFIKEKSDRDKKAMEEISGIMRKEIVECFTGKYSEVVKKKFGNLFKKELIKEDLLNFCEPDELPIIQKFADFTTYFTGFHENRENMYSNEEKATAIANRLIRENLPRYLDNLRIIRSIQGRYKDFGWKDLESNLKRIDKNLQYSDFLTENGFVYTFSQKGIDRYNLILGGQSVESGEKIQGLNELINLYRQKNQLDRRQLPNLKELYKQILSDRTRHSFVPEKFSSDKALLRSLLDFHKEVIQNKNLFEEKQVSLLQAIRETLTDLKSFDLDRIYLTNDTSLTQISNFVFGDWSKVKTILAIYFDENIANPKDRQRQSNSYLKAKENWLKKNYYSIHELNEAISVYGKHSDEELPNTKIEDYFSGLQTKDETKKPIDVLDAIVSKYADLESLLTKEYPEDKNLKSDKGSIEKIKNYLDSIKLLQNFLKPLKPKKVQDEKDLGFYNDLELYLESLESANSLYNKVRNYLTGKEYSDEKIKLNFKNSTLLDGWDENKETSNLSVIFRDTNNYYLGILDKQNNRIFESIPEIQSGEETIQKMVYKLLPGANNMLPKVFFSEKGLLKFNPSDEITSLYSEGRFKKGDKFSINSLHTLIDFYKKSLAVHEDWSVFNFKFDETSHYEDISQFYRQVESQGYKITFKPISKKYIDTLVEDGKLYLFQIYNKDFSQNKKGGGKPNLHTIYFKSLFEKENLKDVIVKLNGQAEVFFRKKSIHYDENITRYGHHSELLKGRFSYPILKDKRFTEDKFQFHFPITLNFKSGEIKQFNARVNSYLKHNKDVKIIGIDRGERHLLYLSLIDQDGKILRQESLNLIKNDQNFKAINYQEKLHKKEIERDQARKSWGSIENIKELKEGYLSQVVHTISKLMVEHNAIVVLEDLNFGFKRGRQKVERQVYQKFEKMLIEKLNFLVFKDKEMDEPGGILKAYQLTDNFVSFEKMGKQTGFVFYVPAWNTSKIDPKTGFVNFLHLNYENVNQAKELIGKFDQIRYNQDRDWFEFQVTTDQFFTKENAPDTRTWIICSTPTKRFYSKRTVNGSVSTIEIDVNQKLKELFNDCNYQDGEDLVDRILEKDSKDFFSKLIAYLRILTSLRQNNGEQGFEERDFILSPVVGSDGKFFNSLDASSQEPKDADANGAYHIALKGLMNLHVINETDDESLGKPSWKISNKDWLNFVWQRPSLKA

SEQ ID NO: 535 - protein, 816 aa, Unknown
  source: /note="Description of Unknown: Cas12 sequence"
MNLIENETKSEEIKSKLDSIMEIMHWTKMFIIEEEIEKDVNFYNEIEEIYDELQPLVTIYNRIRNYVTQKPYSEEKIKLNFGIPTLANGWSKTKEYDNNAIIMIRDGKYYLGIFNAKNKPDKKIMEGHQSEENGDYKKMIYRLLPGPNKMLPKVFMSKTGIAEYKPSQYILECYEQNKHIKSDKNFDIKFCRDLIDFFKTSINRHPEWSKFNFKFSETSEYEDISTFYREVEKQGYKIEWTYISEKEIKELDENGQLYLFQIYNKDFSEKSKGKENLHTMYLKNLFSEENLKNIVLKLNGEAEVFFRKSSIKKPIIHKKGSVLVNKTYNENGERKSIPEEQYTEIYKYLNSIGTNELSEKSKKLMEEGKVEYYKANYDIVKDYRYSVDKFFIHLPMTINFKAAGFSPINNIALKSIALKEDMHIIGIDRGERNLIYVSVIDTKGNIVEQRNFNIVNGIDYKEKLKQKELDRDNARKNWKEIGKIKDLKEGYLSLVVHEIAKLVVKYNAIITMEDLNQGFKRGRFKVERQVYQKFETMLINKLNYLVDKDLAVDQEGGLLRGYQLTYIPESLKVLGRQCGYIFYVPVAYTSKIDPTTGFVAIFNYKGMTDKDFVTSFDSIKYDDERGLFAFEFDYENFVTHKVEMARNKWTVYTYGERIKRKFKNGLWDTAEKVDLTYQMRSILEKYEIEYNKGQDILEQIEELDEKAQNGICKEIKYLVKDIVQMRNSLPDNAVEDYDAIISPVINNNGEFFDSTRGDEDKPLDADANGAYCIALKGLYEVMQIKKNWNEETEFPRKELKIRHQDWFDFIQNKRYL

SEQ ID NO: 536 - protein, 869 aa, Unknown
  source: /note="Description of Unknown: Cas12 sequence"
MENRYQVLQGLTAAQKKAAAAAKKRSSFSIVELNAATRSRVPDEKYVPVQNYFSAMGKVCSQGEPKRENFVTRICAAYQELEEYIPSIRKSLLQEKRATELIKNYLDAVNDLLRFIKPLLGRGNETDKDANFYGEFSFLTDCLFAIVPLYNEVRNYLTQKPYSTEKFKLNFRGSTLLNGWDKNKERDNLGVILRKEGKYFLAIMNKKHNTLFTEGKLQQHTGGECYQKMEYKLIPGSKMLPKVFFSKKGISTFQPSEELLLNYRIGTYKKGEKFNLEHLHKLIDFYKHSIAVHEDWSKFDFHFSDTSSYRDISGFYKEVEQQGYKLTFRNVSVSYINRLVEEGKLYLFQIYNKDFSEYSKGTPNLHTLYWKMLFDPENLKDVVYKLSGEAEVFFRKKSLDVSHPTHPKNEPIEKKNINNKGEKSLFSYDLIKDRRFTVDKFQFHVPITMNFKGEQGDRVNQMVQSYVRNNKGLNVIGIDRGERNLLYLVVINEHGEILEQFSLNEIRNAYNGKEHKIDYHTLLEERSKKRQDARQSWQTIEGIKDLKTGYLSQVIHVITQLMVKYNAIVVLEDLNFGFKSSRQKFEQSVYQQFERKLIDKLNFLVNKKAAPNEVGGLLNAYQLTAPLGNSRKMGKQNGFLFYVPAWHTSKIDPRTGFVNLLDTRYENVAKAKEFFAKFASITYNPEKKWFEFAFDYKAFGNRADGSRTKWTICSYGERIETFRNPENNNQWDTKSVPLTERLTELFSKYGIDYTTNLKEQILNQTDKAFFVELLGALRLTLQLRNSRKSTGEDFLFSPVADENGCFFDSREANDNEPKDADANGAYHIALKGLWVLDTIRNTEEGKNPKLAITNKEWLSFAQAKPFAHE

SEQ ID NO: 537 - protein, 884 aa, Unknown
  source: /note="Description of Unknown: Cas12 sequence"
MSDSYDELTKAQKEKQEKRKHVALTEVVAALEKYTIALDNGHEHKNAVNTFKNYFQNYFFHFDTDKKKTAKTLDCQIKDEYNGLKGILNTPWDKNKKLQQDKKLVQQIKSFLDSIQELLWFIKPLVLTDNTLEKDERFYGEFMPLYDEISNIIKLYNKIRNYLTKKPYSIEKYKLNFENGSLLSGWDVNKEKDNTSVLLCKDNQYYLAIMHIDHNKVFELDELIKHAGKGYQKINYKLLPGANKMLPKVFFSGKNISYYDPSKEILKIRNYGTHTKNGDPQPGFSKRDFSVDDCRKMIDFFKNSIAKHEDWKNFDFKFQPTKNYNSIDEFYREVEEQGYKITYSNVSEDYIDSLVEYGKIYLFHIYNKDFSDKRDESKKHTDNMHTLYWKALFDAKNLKDVVYKLNGEAEIFYRKKSIDIKKPTHEKGKPIDNKNPNARKKTSVFKYDLIKDKRFTVDKFFFHVPITLNFKSKSGYLSNDDVNAAIKKNNDIKIIGLDRGERNLIYLSLINSKGEIAYQESLNVVSTDKGFDVNYHKLLDDKEGNRDEARKNWDKIENIKELKAGYLSQVIHKIAKLMIDNNAIVVMEDLNFGFKRGRFKVEKQIYQKFEKMLIDKLNYLVFKNVHPEQAGGLYKAYQLTAQFESFKKLGKQSGFLFYIPAWNTSKIDPTAGFVDFLKPRYESVTQAKSFLQRFDKINYNKTKDYFEFAFDYKNFTDKANDTKTDWVVCTYGTERYYYDVRTKTTQKIDITAELKKLLEKSEINYLNGKDIKELIIAVDSKEFHSALLKYLAIVLALRYSDSQSGRDFILSPVANEQGHFFNSDKTDDTLPKDADANGAYHIALKGLWAINQIRKTKNGDKLKLTISNKDWLNFVQKKEYRKGV

SEQ ID NO: 538 - protein, 1250 aa, Unknown
  source: /note="Description of Unknown: Cas12 sequence"
MQTLFENFTNQYPVSKTLRFELIPQGKTKDFIEQKGLLKKDEDRAEKYKKVKNIIDEYHKDFIEKSLNGLKLDGLEKYKTLYLKQEKDDKDKKAFDKEKENLRKQIANAFRNNEKFKTLFAKELIKNDLMSFACEEDKKNVKEFEAFTTYFTGFHQNRANMYVADEKRTAIASRLIHENLPKFIDNIKIFEKMKKEAPELLSPFNQTLKDMKDVIKGTTLEEIFSLDYFNKTLTQSGIDIYNSVIGGRTPEEGKTKIKGLNEYINTDFNQKQTDKKKRQPKFKQLYKQILSDRQSLSFIAEAFKNDAEILEAIEKFYVNELLHFSNEGKSTNVLDAIKNAVSNLESFNLTKMYFRSGTSLTDVSRKVFGEWSIINRALDNYYATTYPIKPREKSEKYEERKEKWLKQDFNVRLIQTAIDEYDNETVKGKNSGKVIADYFAKFCDDKETDLIQKVNEGYIAVKDLLNTPYPENEKIGSNKDQVKQIKAFMDSIMDIMHFVRPLSLKDTDKEKDETFYSLFTPLYDHLTQTIALYNKVRNYLTQKPYSTEKIKLNFENSTLLGGWDLNKETDNTAIILRKDNLYYLGIMDKRHNRIFRNVPKADKKDFCYEKMVYKLLPGANKMLPKVFFSQSRIQEFTPSAKLLENYANETHKKGDNFNLNHCHKLIDFFKDSINKHEDWKNFDFRFSATSTYADLSGFYHEVEHQGYKISFQSIADSFIDDLVNEGKLYLFQIYNKDFSPFSKGKPNLHTLYWKMLFDENNLKDVVYKLNGEAEVFYRKKSIAEKNTTIHKANESIINKNPDNPKATSTFNYDIVKDKRYTIDKFQFHIPITMNFKAEGIFNMNQRVNQFLKANPDINIIGIDRGERHLLYYALINQKGKILKQDTLNVIANEKQKVDYHNLLDKKEGDRATARQEWGVIETIKELKEGYLSQVIHKLTDLMIENNAIIVMEDLNFGFKRGRQKVEKQVYQKFEKMLIDKLNYLVDKNKKANELGGLLNAFQLANKFESFQKMGKQNGFIFYVPAWNTSKTDPATGFIDFLKPRYENLNQAKDFFEKFDSIRLNSKADYFEFAFNFKNFTEKADGGRTKWTVCTTNEDRYAWNRALNNNRGSQEKYDITAELKSLFDGKVDYKSGKDLKQQIASQESADFFKALMKNLSITLSLRHNNGEKGDNEQDYILSPVADSKGRFFDSRKADDDMPKNADANGAYHIALKGLWCLEQISKTDDLKKVKLAISNKEWLEFVQTLKG

SEQ ID NO: 539 - protein, 810 aa, Unknown
  source: /note="Description of Unknown: Cas12 sequence"
MQLTDNLSDKYKEAAPLLNENYSNEKGLKNDDKSISLIKNFLDAIKEIEKFIKPLSETNITGEKNDLFYSQFTPLLDNISRIDILYDKVRNYVTQKPFSTDKIKLNFGNSQLLNGWDRNKEKDCGAVWLCKDEKYYLAIIDKSNNSILENIDFQDCDESDCYEKIIYKLLPGPNKMLPKVFFSEKCKKLLSPSDEILKIRKNGTFKKGDKFSLDDCHKLIDFYKESFKKYPNWLIYNFKFKKTNEYNDIREFYNDVASQGYNISKMKIPTSFIDKLVDEGKIYLFQLYNKDFSPHSKGTPNLHTLYFKMLFDERNLEDVVYKLNGEAEMFYRPASIKYDKPTHPKNTPIKNKNTLNDKKTSAFPYDLIKDKRYTKWQFSLHFPITMNFKAPDRAMINDDVRNLLKSCNNNFIIGIDRGERNLLYVSVIDSNGTIIYQHSLNIIGNKFKGKTYKTNYREKLATREKDRTEQRRNWKAIESIKELKEGYISQAVHVICQLVVKYDAIIVMEKLTEGFKRGRTKFEKQVYQKFEKMLIDKLNYYVDKKLDPDEEGGLLHAYQLTNKLESFDKLGTQSGFIFYVRPDFTSKIDPVTGFVNLLYPRYENIDKAKDMISRFDEIRYNAGEDFFEFDIDYDKFPKTASDYRKKWTICTNGERIEAFRNPANNNEWSYRTIILAEKFKELFDNNSINYRDSDDLKAEILSQTKGKFFEDFFKLLRLTLQMRNSNPETGEDRILSPVKDKNGNFYDSSKYDEKSKLPCDADANGAYNIARKGLWIVEQFKKADNVSTVEPVIHNDKWLKFVQENDMTNN

SEQ ID NO: 540 - protein, 875 aa, Unknown
  source: /note="Description of Unknown: Cas12 sequence"
MLPNEKERNEFKNSNAKQYIREISNIITDTETAHLEYDEHISLIESEEKADEMKKRLDMYMNMYHWAKAFIVDEVLDRDEMFYSDIDDIYNILENIVPLYNRVRNYVTQKPYNSKKIKLNFQSPTLANGWSQSKEFDNNAIILIRDNKYYLAIFNAKNKPDKKIIQGNSDKKNDNDYKKMVYNLLPGANKMLPKVFLSKKGIETFKPSDYIISGYNAHKHIKTSENFDISFCRDLIDYFKNSIEKHAEWRKYEFKFSATDSYNDISEFYREVEMQGYRIDWTYISEADINKLDEEGKIYLFQIYNKDFAENSTGKENLHTMYFKNIFSEENLKDIIIKLNGQAELFYRRASVKNPVKHKKDSVLVNKTYKNQLDNGDVVRIPIPDDIYNEIYKMYNGYIKENDLSEAAKEYLDKVEVRTAQKDIVKDYRYTVDKYFIHTPITINYKVTARNNVNDMAVKYIAQNDDIHVIGIDRGERNLIYISVIDSHGNIVKQKSYNILNNYDYKKKLVEKEKTREYARKNWKSIGNIKELKEGYISGVVHEIAMLMVEYNAIIAMEDLNYGFKRGRFKVERQVYQKFESMLINKLNYFASKGKSVDEPGGLLKGYQLTYVPDNIKNLGKQCGVIFYVPAAFTSKIDPSTGFISAFNFKSISTNASRKQFFMQFDEIRYCAEKDMFSFGFDYNNFDTYNITMSKTQWTVYTNGERLQSEFNNARRTGKTKSINLTETIKLLLEDNEINYADGHDVRIDMEKMDEDKNSEFFAQLLSLYKLTVQMRNSYTEAEEQEKGISYDKIISPVINDEGEFFDSDNYKESDDKECKMPKDADANGAYCIALKGLYEVLKIKSEWTEDGFDRNCLKLPHAEWLDFIQNKRYE

SEQ ID NO: 541 - protein, 1238 aa, Unknown
  source: /note="Description of Unknown: Cas12 sequence"
MSNLYSNLHNLYPVQKTLRFELKPQGKTKENMEKAGILKADEHRAEVYGKVKKYCDEYHKTFIDRCLSNIELNEIDKYYELYSINNRDDKQKEELDQLETGLRKQISDAFKKSAEYKGLFQKDMITSYLVTMYKENQEKMQDIGEFNRFTTYFTGYNKNRENMYSEEDKSTAISYRLINENLPTFIDNIKIYKKIVSLMPENIEKIYKDLEEYIQVNSVDEIFNISYYNDVLTQRGIECYNILISGRTKNDGDKIKGLNEYINEFNQTHNEKIPKLQELYKQILSDAESASFKVDIIENDKELLNLIEVYYANILPTLNKIEDLFTRISNYNLELILVNNDGSLSTLSNMVFNEWSYIKGIISQKYDAEYSGKEKYGTEKYAQKKQEYLKKQKIYSLKFLNDCIGNNAICEYLKNYIIQNKNIETIKEDYNEVQNIKAEDDTKELIKDEKSIEKIKKFLDDVKSLQEFVKLVIPKDRTVEKDAKFYSELTPYYEKIKEIIPLYNKVRNYVTQKPYSTEKIKLNFECPTLLNGWDANKEEANLGVILLKEGKYYLGIMNPYCKKIFEVYEKDSNEQNNYKKMEYKLLPGPNKMLPKVFFSNSRIEEFNPSKELQEKYNKGYHKKGKDFDINFCHELIDFYKQSLNKHEDWKKFNFKFKDTSEYNDISEFYREVEEQGYKIEYTEYSEKYINELVDRGELYLFQIYNKDFSEYSKGKENLHTLYWKAVFDPDNIMNPVYKLNGNAEIFYRKKSLEMKVTHPANQPIANKNISTIEAGRSTSTFKYDLIKDKRYTMDKFQFHVPITVNFKSERLFNINQIVNKYLKYNDDIHVIGIDRGERNLLYVCVIDKNEKIVYQKSLNEIVSEYNNNRYTTDYHGLLDRKEKEREIAREDWKNIENIKELKEGYMSQIIHILVELMKKYNAIIVIEDLNKGFKNSRIKVEKQVYQKFEKMFIDKLNYLVFKDEDKMDEGGVLNAYQLTNKFESFTKLGKQSGILYYIPAWCTSKIDPTTGFINRFYLKYENFDKSKEFVNRIDDIRYNEKENLFEFDIDYSKFTDRLNDTKNKWTLCSYGERILTQKNANGEWFDRRIQLSIEFKNLFEKYVINLNNIKDSILKLDKDNIEFYKGNGENLGFIQLFKLMVQMRNSLTGKEEDNLISPVKNQHGKFFNTSERVEGLPIDADANGAYNIARKGFMLVEQMKNVEDEKLNKIKYNITEKEWLNYVQNRGMWWKRQYLYHI

SEQ ID NO: 542 - protein, 1262 aa, Unknown; identical to SEQ ID NO: 532
  source: /note="Description of Unknown: Cas12 sequence"

SEQ ID NO: 543 - protein, 1140 aa, Unknown
  source: /note="Description of Unknown: Cas12 sequence"
MYKDKTDKTKIIDSDLIKFINIAESTQLDSMSQDEAKELVKEFWGFTTYFVGFYDNRKNMYTAEEKSTGIAYRLVNENLPKFIDNMEAFKKAIARPEIQANMEELYSDFSEYLNVESVQEMFQLDYYNMLLTQKQIDVYNAIIGGKTDDEHDVKIKGINEYINLYNQQHKDDKLPKLKALFKQILSDRNAISWLPEEFNGDQEVLNAIKDCYERLSENVLGDKVLKSLLGSLSDYSLDGIFIRNDLQLTDISQKMFGNWCVIQNAIMQNIKHVAPARKHKESEEDYEKRIAGIFKKVDSFSISFINDCLNEADPNNAYFVENYFATFGAVNTPTMQRENLFALVQNAYTEVAALLHSDYPTAKHLAQDKVNVAKIKALLDAIKSLQHFVKPLLGKGDESDKDERFYGELASLWAELDTVTPLYNMIRNYMTRKPYSQKKIKLNFENPQLLGGWDANKEKDYATIILRRDGLYYLAIMNKESKKLLGKAMPSDGECYEKMVYKLLPGANKMLPKVFFAKSRMEDFKPSKELVEKYNNGTHKKGKNFNIQDCHNLIDYFKQSISKHEDWGKFGFNFSDTSTYEDLSGFYREVEQQGYKLSFARVSVSYISQLVEEGKMYLFQIYNKDFSEYSKGTPNMHTLYWKALFDERNLADVVYKLNGQAEMFYRKKSIENTHPTHPANHPILNKNKDNKKKESLFDYDLIKDRRYTVDKFMFHVPITMNFKSSGSENINQDVKAYLRHADDMHIIGIDRGERHLLYLVVIDLQGNIKEQYSLNEIVNEYNGNTYHTNYHDLLDVCEEERLKARQSWQTIENIKELKEGYLSQVIHKITQLMVKYHAIVVLEDLNMGFMRGRQKVEKQVYQKFEKMLIDKLNYLVDKKADASVSGGLLNAYQLTSKFDSFQKLGKQSGFLFYIPAWNTSKIDPVTGFVNLLDTRYQNVEKAKVFFSKFDAIRYNKDKDWFEFNLDYDKFGKKAEGTRTKWALCTRGMRIDTFRNKEKNSQWDNQEVDLTAEMKSLLEHYYIDIHGNLKDAISAQTDKAFFTGLLHILKLTLQMRNSITGTETDYLVSPVADENGIFYDSRSCGDELPENADANGAYNIARKGLMMIEQIKDAKDLDNLKFDISNKSWLNFAQQKPYKNE

SEQ ID NO: 544 - protein, 832 aa, Unknown
  source: /note="Description of Unknown: Cas12 sequence"
MNEADPNNAYFVENYFATFGAVNTPTMQRENLFALVLNAYTEVASLLHSYYPAEKNLAQDKANVAKIKALLDAIKSLQHFVKPLLGKGDESDKDERFYGELASLWAELETVTPLYNMIRNYMTRKPYSQKKIKLNFENPQLLGGWDANKEKDYATIILRRNGLYYLAIMDKDSRKLLGKAMPSDGECYEKMVYKLLPGANKMLPKVFFAKSRMEDFKPSKELVEKYNNGTHKKGKNFNIQDCHNLIDYFKQSISKHEDWGKFGFNFSDTSTYEDLSGFYREVEQQGYKLSFARVSVSYISQLVEEGKMYLFQIYNKDFSEYSKGTPNMHTLYWKALFDERNLADVVYKLNGQAEMFYRKKSIENTHPTHPATHPILNKNKDNKKKESLFEYDLIKDRRYTVDKFMFHVPITMNFKSVGSENINQGVKEYLHHADDMHIIGIDRGERHLLYLVVIDLQGNIKEQYSLNEIVNEYNGNTYHTNYHDLLDAREDERLKARQSWQTIENIKELKEGYLSQVIHKITQLMVKYHAIVVLEDLNMGFMRGRQKVEKQVYQKFEKMLIDKLNYLVDKKADASVSGGLLNAYQLTSKFDSFQKLGKQSGFLFYIPAWNTSKIDPVTGFVNLLDARYQNVEKAKAFFSKFDAIRYNKDKDWFEFNLDYDKFGKKAEGTRTKWTLCTRGMRIDTFRNKEKNSQWDNQEVDLTAELKSLLEHYYIDIHGNLKEAISTQTDKAFFTGLLHILKLTLQMRNSITGTETDYLVSPVADENGIFYDSRTCGDELPENADANGAYNIARKGLMMIEQIKNAEDLGNLKFDISNKAWLNFAQQKPYKNG

SEQ ID NO: 545 - protein, 831 aa, Unknown
  source: /note="Description of Unknown: Cas12 sequence"
MDNNNLHAVDGYFATLGAVNTPTMQRENLFALIQNAYTDISDLLDTPYPENKNLAQDKTNVAKVKALLDAIKSLQHFVKPLLGMGDESDKDERFYGELASLWTELDTVTPLYNMIRNYMTRKPYSEKKIKLNFENPQLLGGWDANKEKDYATIILRRNGMYYLAIMDKDSKKLLGKTMPSDGECYEKMVYKLLPGANKMLPKVFFAKSRINDFKPSKKIVENYNNGTHKKGKNFNINDCHDLIDYFKQSIDKHEDWSKFGFNFSDTSTYEDLSGFYREVEQQGYKLSFTNISVSFIDKLVDEGKMYLFQIYNKDFSDYSKGTPNMHTLYWKALFDERNLADVVYKLNGEAEMFYRKKSINNTHPTHHANHPIQNKNKDNKKKESVFEYDLVKDRRYTEDKFLFHVPITMNFNSVGAENINQQVRKYLQQADDTHIIGIDRGERHLLYLVVIDMQGNIKEQFSLNEIVNEYNGNTYRTNYHDLLDVRADKRLKASQSWQTIENIKELKEGYLSQAIHKITQLMVKYHAVVVLEDLNKGFMRGRQKVEKQVYQKFEKMLIDKLNYLVDKHKDANETGGLLHALQLTSEFKNFKKSEYQNGFLFYIPAWNTSKIDPVTGFVNRFDTRYTNAVEAQKFFRKFDEIRYNEEKDWFEFEFDYDKFTQKAHGTRTRWTLCTHGKRLRSFRNPAKQYNWDSEVVALTDEFKRILGEAGIDIHENLKDAISNLEGKRRKYLEPLMQFMKLLLQLRNSRKNPEEDYILSPVADENGVFYDSRSCGDKLPENADANGAYNIARKGLMLIRQIKEAKELGKVKYDISNKAWLNFAQQKPYKNE

SEQ ID NO: 546 - protein, 1177 aa, Unknown
  source: /note="Description of Unknown: Cas12 sequence"
MQKKAFEENQQNLRSIIAKKLTEDKAYANLFGKNLLESYKDKTDKTKIIDSDLIKFINTAESTQLDSMSQDEAKEIVKEFWGFTTYFVGFFDNRKNMYTAEEKSTGIAYRLINENLPKFIDNMEAFKKAIARPEIQADMEELYSNFSEYLNVESIQEMFLLDYYNMLLTQKQIDVYNAIIGGKTDDEHDVKIKGINEYINLYNQQHKDDKLPKLKALFKQILSDRNAISWLPEEFNSDQEVLNAIKDCYERLSENVLGDKVLKSMLGSLADYSLDGIFIRNDLQLTDISQKMFGNWSVIQNAIMQNIKHVAPARKHKESEEEYENRIAGIFKKADSFSISYIDACLNETDPNNAYFVENYFATLGAVDTPTMQRENLFALVQNAYTEITALLHSDYPTEKNLAQDKANVAKIKALLDAIKSLQHFVKPLLGKGDESDKDERFYGELASLWAELDTMTPLYNMIRNYMTRKPYSQKKIKLNFENPQLLGGWDANKEKDYATIILRRNGLYYLAIMNKDSKKLLGKAMPSDGECYEKMVYKLLPGANKMLPKVFFAKSRMEDFKPSKELVEKYNNGTHKKGKNFNIQDCHNLIDYFKQSIDKHEDWSKFGFKFSDTSTYEDLSGFYREVEQQGYKLSFARVSVSYINQLVEEGKMYLFQIYNKDFSEYSKGTPNMHTLYWKALFDERNLADVVYKLNGQAEMFYRKKSIENTHPTHPANHPILNKNKDNKKKESLFEYDLIKDRRYTVDKFMFHVPITMNFKSVGSENINQDVKAYLRHADDMHIIGIDRGERHLLYLVVIDLQGNIKEQFSLNEIVNDYNGNTYHTNYHDLLDVREDERLKARQSWQTIENIKELKEGYLSQVIHKITQLMVKYHAIVVLEDLNMGFMRGRQKVEKQVYQKFEKMLIEKLNYLVDKKADASVSGGLLNAYQLTSKFDSFQKLRKQSGFLFYIPAWNTSKIDPITGFVNLLDTRYQNVEKAKAFFSKFDAIRYNKDKEWFEFDLDYDKFGRKAEGTRTKWTLCTRGMRIDTFRNKEKNSQWDNQEIDLTAEMKSLLEHYYIDIQGNLKEAICTQTDKAFFTGLLHILKLTLQMRNSITGTQTDYLVSPVADENGIFYDSRSCGDSLPENADANGAYNIARKGLMLIEKIKNAEDLDTIKFDISNKAWLNFAQQKPYKNG

SEQ ID NO: 547 - protein, 814 aa, Unknown
  source: /note="Description of Unknown: Cas12 sequence"
MLENEQEAEKIKNKLDDIMNIYHWIKIFLVDEEIEKDMDFYSEIEDIYEELSPLVSLYNRVRNYVTQKPYSQEKMKLNFGSPTLADGWSKSKEFSNNAIIMLKDGKYYIGIFNIRNKPNKEVIEGRNNRINDSDYKKMVYRLLPGANKMLPKVMFSKKGIEYYNPSQYILSGYNSKKHIKSNENFDINFCHDLIDFFKESINKNEEWKNFDFKFSDTESYNDISEFYREVEQQGYKIEWVYISEQDIEQLEKNGQLYIFQIYNKDFAKKSIGNKNLHTMYLENLFSEENLKDVVLKLNGEAEIFFRKSSIKKPIVHKAGSILVNKCIEDETGNKVSFPDDIYNEIYQYMNGMTDVLSERAQNYYEKVKHSVSKQDIVKDYRYTVDKYFIHLPITINFKASSFMPINDIALKYIAKRDDIHIIGIDRGERNLIYVSVIDLQGNIVYQKNYNVVNGYDYKAKLRETEIQRDNARKNWKEIGKIKQLKEGYLSLVVHEIAQLIVKYNAIVVMEDLNMGFKRGRFKVERQVYQKFENMLINKLNYLVDKNKKVDEDGGLLRGYQLTYVPGQKEHVGKQCGFIFYVPAAYTSKIDPTTGFVSIFNNKVNAKEFVTKFDSIKYNKNMKMFELKFDYNNFETYNITLAKSKWTIYTNGIRLKREYNNGRWNKITEVDLTKEMANTLKKYDIEFENNEEILKSISQLDEKNQRNICNEIKEIIKLIVQLRNSMPDNGSKDNEYDKIISPVLNENNYFYDSSEVCDNSAPENADANGAYCIAMKGLYQVIQIKENWSQDSNPKNILGIKHYEWFDFMQNKRYL

SEQ ID NO: 548 - protein, 1262 aa, Unknown
  source: /note="Description of Unknown: Cas12 sequence"
MAKNTIFTQFTGLYPVSKTLRFELKPMGKTLEKIKETGVIENDKKRHNDYFDAKKIIDKYHKYFIDAALSKFSRIDWNPLKEAIEGSLDRSDASKKKLEKTQTEFRKKIAKALTTHDHYKELTASTPKDLFLKVFPDHFGKQPAIDTFDGFSSYFTGFQENRQNIYSDEAISTAIPYRLVHDNFPKFLSNIEVYKTLKDNAPSVLSDAENELKDFLNGKPLANIFELNAYNDVLTQSGIDFFNQVIGGISGEGGEKKTRGINEFSNLYRQQHPEFAQKRLATKMIPLYKQILSDRETKSFILESYSTDSQVQESVKEFFESQILNCDIAGRKVNVLNELTSLIKRIAEFDLGSIYINQEELSNISLELFKSWNTINAVLFKNAENRIGSAEKAANKKKIDAWMKSNEFSIATLNLAIAESDSEEISRVKIESYWNDFEAKVQSILCGDNRRNLDEFLSATFNENNALREDSEIIGKLKAFLDALIEIMHSIKPLISDAENRDLSFYNELMPLYDQLSLVVPLYNKIRNYATQKLTESEKFKLNFDNPTLADGWDQNKEDANTAILLLKNGLYYLGIMNAKNKPKIKDFKTSESEDCYDKMVYKLLPGPNKMLPKVFFSEKGLATFKPPKDILDGYNAGKHKKGDLFDIGFCHQLIDFFKESIAKHPDWKKFDFKFSDTSSYEDISGFYKEVTDQGYKITFSKIPTSQIDEWVNEGKLFLFQIYNKDFAPGAKGSPNLHTLYWKSVFSPENLKDVVVKLNGEAELFYRPSSVKKPYSHKVGEKLVNRIGKDGLPLPESVFGELFRYFNGKLDGELSDEAKRYLDVAVVKDVKHEIVKDRRYTQDKFEFHVPLTLNFKADSKNEYMNERVRHFLKDNPDVNIIGIDRGERHLLYMTLINQKGEILKQKSFNIVESVNYQAKLVQREKERDAARKSWSSVGKIKDLKEGFLSQVIHEITTTMIENNAIVVLEDLNFGFKRGRFCVERQVYQKFEKMLIDKLNYLVFKNKPEGDVGGVLKGYQLAEKFDSFQKLGKQSGFLFYIPAAYTSKIDPTTGFANLFNMTELTSAEKKKDFLSHFDDITYDGKNDRFLFGFDYKNFKCFQTDFIKKWTVYTQGKRIVYDKESKSAKEIFPVEIIKAALAKQNIALTDQLDVLSAINSVEASPKSASFFGNICYAFEKTLQMRNSIPNTDEDYLVSPVMNKRGEFYDSRSCDDALPQNADANGAYHIALKGLYLIKNVFDAGGKDLKISHEDWFKFAQSRNC

SEQ ID NO: 549 - protein, 791 aa, Unknown
  source: /note="Description of Unknown: Cas12 sequence"
MRPVLQLTDTEDKLSQNKPAVGKIKALLDAFKDLQHFIKPLLGSGEENEKDELFYGAFQLIWDELDTVTPLYNKVRNWLTRKPYSTEKIKLNFDNAQLLGGWDVNKEPDCTGVLLRKDGFYYLGIMNKKSNRIFDADVTPADGICYEKIDYKLLPGANKMLPKVFFSKSRIDEFAPSEAILSSYKRGTHKKGADFSLSDCHRLIDFFKASINKHEDWSKFGFQFSDTKTYEDISGFYREVEQQGYMLSSHQVSEAYINQMVEEGKLFLFRIWNKDFSEYSKGTPNMHTLYWRMLFDERNLADVVYKLNGQAEVFYRKASIKAENQIMHPAHHPIENKNTLNEKRSSTFDYDLVKDRRYTVDKFQFHVPITINFKAIGQTNVNPIVHETIRRGGFTHVIGIDRGERHLLYLSLIDLKGHIVKQMTLNEIINEYNGLAHKTNYYDLLVKREGERTTARRSWDTIENIKELKEGYLSQVIHIISKMMVEYNAIVVLEDLNMGFMRGRQKIERQVYEKFEKMLIDKLNCYIDKQADSQSEGGLLHPIQLANKFESFRKLGKQSGCLFYIPAWNTSKIDPVTGFVNLFDTRYETREKAKLFFSHFQRICFNAEKDWFEFSFDYNDFTTKAEGTRTQWTLCSYGTRIRNFRNPLQNHQWDDEEIVLTEAFKALFDKYDIDIHANLKEAINAQTDAQFFKDLMGLMKLLLQMRNSKTNSEVDYLLSPVADEHGRFFDSRAGAGSLPDNADANGAYNIARKGLWVIRKIQETPEGEKLSLAITNKEWLEFAQTKPYLND

SEQ ID NO: 550 - protein, 1262 aa, Unknown
  source: /note="Description of Unknown: Cas12 sequence"
MNLNTYFSQFTGLYPVSKTLRFELKPMGKTLEKIKETGIIENDKKRHNDYFDAKKIIDKYHKYFIDAALSKFPCIDWNPLKEAIERSLDRSDASKKKLEKTQTEFRKKIAKALTTHGHYKELTASTPKDLFLKVFPDHFGKQPAIDTFDGFSSYFTGFQENRQNIYSDEAISTAIPYRLVHDNFPKFLSNIEVYNILKDNAPSVLSDAENELKDFLNGKPLANIFELNAYNDVLTQSGIDFFNQVIGGFSGEGGEKKTRGINEFSNLYRQQHPEFAQKRLATKMIPLYKQILSDRETKSFILESYSTDSQVQESVKEFFESQILNCDIAGRKVNVLKELSSLIKRITEFDLGSIYVNQEELSSISLELFKSWNTINAILFKNAENRIGSAEKAANKKKIDAWMKSNEFSIATLNLAIAESDSEEISRVKIESYWNNFEAKVQSILCGDNRRNLDEFISATFNENNALREDSKVIEKLKAFLDALIEIMHSIKPLISDAENRDLSFYNELMPLYDQLSLVVPLYNKIRNYATQKLTESEKFKLNFDNPTLADGWDQNKEEANTAILLLKNGLYYLGIMNAKNKPKIKDFKTSESEDCYDKMVYKLLPGPNKMLPKVFFSEKGLATFKPPKDILDGYNAGKHKKGDLFDIGFCHQLIDFFKESIAKHPDWKKFDFKFSDTSSYEDISGFYKEVTDQGYKITFSKIPTPQIDEWVNEGKLFLFQIYNKDFAPGAKGSPNLHTLYWKSVFSPENLKDVVVKLNGEAELFYRPSSVKKPYSHKVGEKLVNRIGKDGLPLPESVFGELFRYFNGKLDGELSDEAKRYLDVAVVKDVKHEIVKDRRYTQDKFEFHVPLTLNFKADSKNEYMNERVRHFLKDNPDVNIIGIDRGERHLLYMTLINQKGEILKQKSFNIVESVNYQAKLVQREKERDTARRSWSSVGKIKDLKEGFLSQVIHEITTTMIENNAIVVLEDLNFGFKRGRFCVERQVYQKFEKMLIDKLNYLVFKNKPEGDVGGVLKGYQLAEKFDSFQKLGKQSGFLFYIPAAYTSKIDPTTGFANLFNMTELTSAEKKKEFLSHFEDITYDGKNDRFLFSFDYKKFKCFQTDYIKKWTVYSQGKRIVYDKESKSAKAISPVEIIKAALAKQNIALTDQLDVLSAINSVEASRETASFFGDICYAFEKTLQMRNSIPNTDEDYLVSPVMNKKGEFYDSRSCGDSLPKNADANGAYHIALKGLYLIKNVFDAGGKDLKISHEDWFKFAQSRNR

SEQ ID NO: 551 - protein, 1250 aa, Unknown
  source: /note="Description of Unknown: Cas12 sequence"
MQTLFENFTNQYPVSKTLRFELIPQGKTKDFIEQKGLLKKDEDRAEKYKKVKNIIDEYHKDFIEKSLNGLKLDGLEEYKTLYLKQEKDDKDKKAFDKEKENLRKQIANAFRNNEKFKTLFAKELIKNDLMSFACEEDKKNVKEFEAFTTYFTGFHQNRANMYVADEKRTAIASRLIHENLPKFIDNIKIFEKMKKEAPELLSPFNQTLKDMKDVIKGTTLEEIFSLDYFNKTLTQSGIDIYNSVIGGRTPEEGKTKIKGLNEYINTDFNQKQTDKKKRQPKFKQLYKQILSDRQSLSFIAEAFKNDTEILEAIEKFYVNELLHFSNEGKSTNVLDAIKNAVSNLESFNLTKIYFRSGTSLTDVSRKVFGEWSIINRALDNYYATTYPIKPREKSEKYEERKEKWLKQDFNVSLIQTAIDEYDNETVKGKNSGKVIVDYFAKFCDDKETDLIQKVNEGYIAVKDLLNTPYPENEKLGSNKDQVKQIKAFMDSIMDIMHFVRPLSLKDTDKEKDETFYSLFTPLYDHLTQTIALYNKVRNYLTQKPYSTEKIKLNFENSTLLGGWDLNKETDNTAIILRKENLYYLGIMDKRHNRIFRNVPKADKKDSCYEKMVYKLLPGANKMLPKVFFSQSRIQEFTPSAKLLENYENETHKKGDNFNLNHCHQLIDFFKDSINKHEDWKNFDFRFSATSTYADLSGFYHEVEHQGYKISFQSIADSFIDDLVNEGKLYLFQIYNKDFSPFSKGKPNLHTLYWKMLFDENNLKDVVYKLNGEAEVFYRKKSIAEKNTTIHKANESIINKNPDNPKATSTFNYDIVKDKRYTIDKFQFHVPITMNFKAEGIFNMNQRVNQFLKANPDINIIGIDRGERHLLYYTLINQKGKILKQDTLNVIANEKQKVDYHNLLDKKEGDRATARQEWGVIETIKELKEGYLSQVIHKLTDLMIENNAIIVMEDLNFGFKRGRQKVEKQVYQKFEKMLIDKLNYLVDKNKKANELGGLLNAFQLANKFESFQKMGKQNGFIFYVPAWNTSKTDPATGFIDFLKPRYENLKQAKDFFEKFDSIRLNSKADYFEFAFDFKNFTGKADGGRTKWTVCTTNEDRYAWNRALNNNRGSQEKYDITAELKSLFDGKVDYKSGKDLKQQIASQELADFFRTLMKYLSVTLSLRHNNGEKGETEQDYILSPVADSMGKFFDSRKAGDDMPKNADANGAYHIALKGLWCLEQISKTDDLKKVKLAISNKEWLEFMQTLKG

SEQ ID NO: 552 - protein, 1390 aa, Unknown
  source: /note="Description of Unknown: Cas12 sequence"
MIDNTKEKKEGSVFDGFTRKYQLSKTLRFELRPILNTPKMLDDEQVIKNDETRRKKYEAVKPWFDQLHREFIEDALKSFKFKNLAIYQDTFQTWQKDRKSKQKKDTLVKIEVGLREEIVRRFEEVANIWVRSEQYKLLGIKKEGLGMLFEAGVFRLLKERFKNEKDTTVDGNNIFDEWTRWTGYFKKFFETRKNFYKSDDTSTAIAYRVINQNLRRFCENIQIFEKISEKIEFSEVEKSFDISCAGIFSLAYYNACLLQGGIDTYNKIIGGEVDEKDKKIPGINELINKYRQDNSGEKIPFLKQLDKQIHSAKEAFIESIETNKELVGKLKTFYENAEVKIQSFRNLIADIVTDYSGYDIDKIYLTKEAVSHNASRWFASFESFERDLFAVVAEKQNKLVYELLRTHKNDSKISDKDGKFSFPDFIKCSHIKRALEKQEGRIWKGEYYEDIVDFEKIKDVFTQFLCVFKFELEQQFFRKTTSAQTGEQTKIGYEIFVTKINELITRENPVIDLEEKIAIKNFADATLLIYQIAKYFAVEKRRGWLDNYDLDDRFYKSSDIGYLNFYRDAFEQIVRPYNLFRNYLTKKPYNTNKWVLSFENPTLADGWDKNKEKTNAAVILRKDGRYYLGIIKEDCKSLFADRYSKEMSEGIESGSFQKMAYKFFPEASKMIPKCSTQTKNVKEHFRKSSSDYNLFHEKDYKISVAITKNIYELNNVFYRKDNIEESFVPKNDFEKKLGVKKFQRQYLEISRDNNGYKQALAQWIEFCIRFLKAYKSTTIFDYSRLREAKEYESLDAFYQDINALTYNISFVPISEQYIKEKNDNGELFLFEIYNKDWSLGPMDKNRKRTKNLHTLYFEQLFSKENEQENFLFQLNGEAELFFRPKTEEKRLGYKVWDAGEKKWVKAKEKEDGAVIDRKRYAKDIILFHCPITLNRVSESKTKREMDVEIREVLSSTPGVHIIGVDRGEKHLAYYSVIDQNGKIIETDTLNSIGKDGRGKPVEYASKLEKRAQEREASRRDWEEVEAIKDLKKGYISQVIRNLADLIIKHNAIIVFEDLNMRFKQIRGGIEKSAYQQLERALIDKLSFLVKKGEEDPKQTGHILRAYQLAAPVIAFKDMGKQTGLIFYTQAGYTSKTCPECGYRRNIKCLFENIEQAKTLIENLESINYNKKEDVFQISYSLEKLSSKDQKKEKKVSNELYAKTLKKDIFILTTKNALRYKWYDRYSEKAKVAKRGIDEYKGEVNESETKKGVVKEFNLTEYLKGLLKTYEIDYEHGGIREQILSVARGREFYKDFLYALFLLTETRHSISGRNTDYIQCPECEFDSRKGFKDIKEFNGDANGAYNIARKGIMILEKIKQFKKDNDGNLEKMGWGDLSISIEEWDKFTQKE

SEQ ID NO: 553 - protein, 1333 aa, Unknown
  source: /note="Description of Unknown: Cas12 sequence"
MKNFQDFTNLYELSKTLRFELKPIGGTKKLIEEKNILKLDKKKRENYEKVKPYFNKIHQEFINFALRNPNFDFSQFEEKYLNWLKDKKNKDLLKEKESIDKIFLEKIGKLFENSVKDFLKENGFESIVKEEDQNLKFFRRKEIFEVLQEKYGSELETQMVNKDGEIKSIFNGWEKWLGYFDKFFNTRDNFYKTDGTSTAIATRIIKDNLKIFLENIVAFGKIKNKKIDFSEVEKNFSVSIDTFFEINNFNNCFLQDGIDFYNKVIGGETLENGEKLKGLNEIINKYRQDTGEKIPYFKKLQKQILSEKDGVFIDKIEDDGGFYEVLKNFYKNAAEKEGFLKNIFENFYTISDKNLEKIYFNKIAFNTISHKFGSALEFERILYEEMKKEKADGIKFEKKENKYKFPDFIQIIFIKRSLENYDSENLFWKERYYKSEENVDGFLEKNNNNLWGQFCKILNFEFLNILKRRIIDEAGEEYEVGFEISKNILGEKLENFELNQENKGIIKDFADYSLALYSFGKYFAVEKGRNWDLNIDISDDFYGGEDGYIEKFYNTGYDEIVKPYNLMRNYISKKPWEDNKKWKINFETSSLLSGWDKNLESNGSYIFQKGNKYYLGIINGSKPAKEILEKLYSGDGEKIKRFIYDFQKPDNKNTPRMFIRSKKDSFSPAVEKYNLPINDILEIYDNGLFKTENKGNPNYKESLRKLIDYFKLGFSRHESFKHFNFVWKDSKSYENIADFYRDVEKSCYKIDFEFLNFEELKKLTFEKHLYLFQIYNKDFELDESLQEKGYNFKGEGQKNIHTKYFEALFLEENISRKSGAVFKLSGGGEVFFRKKSIKAKKEKRNSVEVIKNKRYTECKYFLHFPIQVNFKEEISGNFNQEINKFLANNPDINVIGIDRGEKHLAYFSVINQKGEILESGSFNKIENYNKNGEKLLFPEREIKEIHKDGSLIDLELVETGRKVDYVDYKLLLEYKERKRLLQRQSWKEVEQIKDLKKGYISALVRKIADLIIKHNAIVIFEDLNFRFKQIRGGIEKSIYQQLEKALIDKLNFLVNKNEINLEKAGSILKAYQLTVPVDSLKEIGKQTGVIFYTEAAYTSKIDPITGWRPNLYLKKNNSKINKENILKFDNIVFNSKENRFEFTYDLKKFFGKDSKFPAKTVNTVCSCVERFKWNRNLNNNKGGYIHYENLTDGKLANKEQKEDEFSNFKELFEKYFIDINGNILEQIKNLDTKNNEKFFSSFIDLFTLVCQIRNTNQNAKGDENDFILSPVEPFFDSRKSQNFGKSLPKNGDENGAFNIARKGLIILNRISENPEKPDLLIFNADWDNFARNI

SEQ ID NO: 554 - protein, 1329 aa, Unknown
  source: /note="Description of Unknown: Cas12 sequence"
MSNNFQEFTQKYALSKTLRFELKPVGKTKEILEKEMPMYQIINADKNIKAKYIQTKPFFDQLHRDFIKEAFENVELSGLSDFFENWKIYKQDKKANEKIYKKSAENLRKEVVSFLNAKGKDWAEKYHSSGLKKADIEILFEEGIFKVLEIRYGTDTNSFITNATTGEITSIFQGWKGFTGYFLKFWNTRENYYKTDGTSTAIATRIVDQNLPGYLENLEIFEKMKGKIDFESVRGDFSDFEKIGTVEYYSTCLLQEGIDGYNRIIGGYTYENGEKIKGINEIINLYRQTHKDEKVPFLKTLDKQIGSEKIAFMETIDTPEEFRKIFEEFVLKSSEKVVLLKQCLNHLFENELTDGVFLSKESLNTISHKWIDIGNMKLFHESLFTILKKEGAKYDSKEDEYKFPDFIRISDIKTALVKITTESFFWKNRYLYEKDENPTGFLTSDNSLWEGFIQIFSHEFSSLFERTEKDEEGKDIQWGYDISLLNIQKLLENNEYNPNDEKNKIIIKSFADDILRIYQMGKYFALEKKRQWNPDNLEIGEFYSHPEIGYDKFYFDSYKIIVQGYNDIRNYLTKNPWSEEKWKLNFENPTLANGWDKNKETDNSCIFLKRDNKFFLALMSRGNNQVFDERNIQKFAQNIEQGKYEKMVYKYMKDVALGIPKATTQLNAVQEHFFQSDKDYIITKGGSSIGEFIKPLRVTKRIFELNNRIYPKDNLGISFLRNQVNKKEQKNYIKIFQKEFITLGGDEVVYKKAVHDWIDFCKEYTKSYPSCAYFDYSGLKDTKEYSSIDEFYNDLDSFGYQISWQDISSSYIDELVESGKLYLFEIYNQDFSNGKTGAKNLHTLYFEHIFSKENQEVNFPLKLNGQAELFFRPKSIEAKGENRKFNREIIAKKRYTEDKIFFHVPLTLNRTEGDIYGFNTEINNFLAHNPDINIIGIDRGEKHLAYYSVIDQKGNIIESDSLNTVNEINYGEKLTDTAEKRKQARQDWQAVEGIKNLKKGYISAVVHKLTDLIIKYNAIVIFEDLNMRFKQIRGGIEKSVYQQLEKALIEKLNYLVEKGEINPEKAGHLLNAYQLTAPFETFKDMGKQTGIVFYTQAAYTSKIDPVTGWRPHLYLKYSSAEQVKKEIAKFSNIIWNNTEKRFDFMYDIRNFSTQKEYPKNNIWTVCSSVERYRWDKTLNQNKGDYVHYKSITPEFEKLFSDFQIDGTKNILEQINRMETKGNEKFFKSFIFFFGLICQIRNTNKADSDENKQDFILSPVVPFFDSRDSENTKNGLPRNGDENGAYNIARKGLIILQKINEFSDENGNCDKLGWKELSISQVDWDNYIKT

SEQ ID NO: 555 - protein, 841 aa, Unknown
  source: /note="Description of Unknown: Cas12 sequence"
MEYDEHISLIESEEKADEMKKRLDMYMNMYHWAKAFIVDEVLDRDEMFYSDIDDIYNILENIVPLYNRVRNYVTQKPYTSKKIKLNFQSPTLANGWSQSKEFDNNAIILIRDNKYYLAIFNAKNKPDKKIIQGNSDKKNDNDYKKMVYNLLPGANKMLPKVFLSKKGIETFKPSDYIISGYNAHKHIKTGENFDISFCRDLIDYFKNSIEKHAEWRKYEFKFSATDSYNDISEFYREVEMQGYRIDWTYISEADINKLDEEGKIYLFQIYNKDFAENSTGKENLHTMYFKNIFSEENLKNIVIKLNGQAELFYRKASVKNPVKHKKDSVLVNKTYKNQLDNGDVVRIPIPDDIYNEIYKMYNGYIKESDLSGAAKEYLDKVEVRTAQKEIVKDYRYTVDKYFIHTPITINYKVTARNNVNDMAVKYIAQNDDIHVIGIDRGERNLIYISVIDSHGNIVKQKSYNILNNYDYKKKLVEKEKTREYARKNWKSIGNIKELKEGYISGVVHEIAMLMVEYNAIIAMEDLNYGFKRGRFKVERQVYQKFESMLINKLNYFASKGKSVDEPGGLLKGYQLTYVPDNIKNLGKQCGVIFYVPAAFTSKIDPSTGFISAFNFKSISTNASRKQFFMQFDEIRYCAEKDMFSFGFDYNNFDTYNITMGKTQWTVYTNGERLQSEFNNARRTGKTKSINLTETIKLLLKDNEINYADGHDVRIDMEKMDEDKNSEFFAQLLSLYKLTVQMRNSYTEAEEQEKGISYDKIISPVINDEGEFFDSDNYKESDDKECKMPKDADANGAYCIALKGLYEVLKIKSEWTEDGFDRNCLKLPHAEWLDFIQNKRYE

SEQ ID NO: 556 - protein, 886 aa, Unknown
  source: /note="Description of Unknown: Cas12 sequence"
MFGNWGVIQNAVMQNIKRVAPARKHKESEEDYEKRIAGIFKKADSFSISYINDCLNEADPNNAYFVENYFATFGAVNTPTMQRENLFALVQNAYTEITALLHSDYPTEKNLAQDKANVAKIKALLDAIKSLQHFVKPLLGKGDESDKDERFYGELASLWAELDTMTPLYNMIRNYMTRKPYSQKKIKLNFENPQLLGGWDANKEKDYATIILRRNGLYYLAIMNKDSKKLLGKAMPSDGECYEKMVYKLLPGANKMLPKVFFAKSRMEDFKPSKELVEKYNNGTHKKGKNFNIQDCHNLIDYFKQSIDKHEDWSKFGFKFSDTSTYEDLSGFYREVEQQGYKLSFARVSVSYINQLVEEGKMYLFQIYNKDFSEYSKGTPNMHTLYWKALFDERNLADVVYKLNGQAEMFYRKKSIENTHPTHPANHPILNKNKDNNKKESLFEYDLIKDRRYTVDKFMFHVPITMNFKSSGSENINQDVKAYLCHADDMHIIGIDRGERHLLYLVVIDLQGNIKEQFSLNEIVNDYNGNTYHTNYHDLLDVREDERLKARQSWQTIENIKELKEGYLSQVIHKITQLMVKYHAIVVLEDLNMGFMRGRQKVEKQVYQKFEKMLIEKLNYLVDKKADASVSGGLLNAYQLTSKFDSFQKLGKQSGFLFYIPAWNTSKIDPVTGFVNLLDTRYQNVEKAKSFFSKFDAIRYNKDKEWFEFNLDYDKFGKKAEGTRTKWTLCTRGMRIDTFRNKEKNSQWDNQEVDLTAEMKSLLEHYYIDIHSNLKDAISAQTDKAFFTGLLHILKLTLQMRNSITGTETDYLVSPVVDENGIFYDSRSCGDELPENADANGAYNIARKGLMMIEQIKDAKDLDNLKFDISNKAWLNFAQQKPYKNG

SEQ ID NO: 557 - protein, 1228 aa, Unknown
  source: /note="Description of Unknown: Cas12 sequence"
MSNLYSNLHNLYQVQKTLRFELKPQGKTKENMEKVGILKADEHRAEIYSKVKKYCDEYHKLFIDKSLSNIELNGIDRYYELYSINNRDDKQKEELDQLEASLRKQISDAFKKSAEYKGLFQKDIITSYLVTMYKENQEKMQDIGEFNRFTTYFTGYNKNRENMYSEEDKSTAISYRLINENLPTFIDNIKIYKKIVSLMPEDIEKIYKDLEEYIQVDSIDEIFNISYYNDVLTQRGIECYNILISGRTKNDGDKIKGLNEYINEFNQTHNEKIPKLQELYKQILSDAESASFKIDVIKNDKELMNLIEVYYANILPILNKIEDLFTRISNYNLELILVNNDGTLSTLSNMVFNEWSYIKGAISEKYDEEYSGKEKYGTEKYAQKKQEYLKKQKIYSLKFLNDCIGNNAICEYLKNYIIQNKNIETIKEDYNEVQNIKVEDDTKELIKDEKSIEKIKKFLDDVKSLQEFVKLVIPKDRTVEKDAKFYSELTPYYEKIKEIIPLYNKVRNYVTQKPYSTEKIKLNFECPTLLKGWDANKEEANLGVILLKEGKYYLGIINPYCKKIFEVDEKDSNEQNNYKKMEYKLLPGPNKMLPKVFFSNSRIEEFNPSKELQEKYNKGYHKKGKDFDINFCHELIDFYKQSVNKHEDWKKFNFKFKDTSEYNDISEFYREVEKQGYKIEYTEYSEKYINELVDRGELYLFQIYNKDFSEYSKGKENLHTLYWKAVFDPDNIMNPVYKLNGNAEVFYRKKSLEMKVTHPANQPIANKNISTIEAGRSTSTFKYDLIKDKRYTMDKFQFHVPITMNFKSERLFNINQIVNKYLKYNDDIHVIGIDRGERNLLYVCVIDKNEKIVYQKSLNEIVSEYNNNRYTTDYHGLLDRKEKEREIAREDWKNIENIKELKEGYMSQVIHILVELMKKYNAIIVIEDLNKGFKNSRIKVEKQVYQKFEKMFIDKLNYLVFKDEDKMNEGGVLNAYQLTNKFESFTKLGKQSGILYYIPAWCTSKIDPTTGFINRFYLKYENFDKSKEFVNRIDDIRYNEKENLFEFDIDYSKFTDRLNDTKNKWTLCSYGERILTQKNANGEWLDRRIQLSIEFKKLFEKYGINLNNIKDSILKLDKDNLEFYKGNGESLGFIQLFKLMVQMRNSLTGKEEDNLISPVKNQHGKFFNTSEKIEGLPIDADANGAYNIARKGFMLVEQMKNVEDEKLNKIKYNITEKEWLNYVQNRGM

SEQ ID NO: 558 - protein, 1142 aa, Unknown
  source: /note="Description of Unknown: Cas12 sequence"
MARIFEDFKRLYPLSKTLRFEAKPIGATLDNIVKSGLLDEDEHRAESYVKVKKLIDEYHKVFIDRVLDNGCLPLKNEGHNNSLTEYYDSYVSKSQNEDAKKAFEENQQNLRSIIAKKLTEDKAYANLFGKNLIESYKDKTDKTKIIDSDLIQFINTAESTQLNSMSQDEAKELVKEFWGFTTYFVGFFDNCKNMYTAEEKSTGIAYRLINENLPKFIDNMEAFKKAIARPEIQANMEELYSNFSEYLNVESIQEMFLLDYYNMLLTQKQIDVYNAIIGGKTDDEHDVKIKGINEYINLYNQQHKDDKLPKLKALFKQILSDRNAISWLPEEFNSDQEVLNAIKDCYERLSENVLGDKVLKSLLGSLADYSLDGIFIRNDLQLTDISQKMFGNWGVIQNAIMQNIKRVAPARKHKESEEDYEKRIAGIFKKADSFSISYINDCLNEADPNNAYFVENYFATFGAVNTPTMQRENLFALVQNAYTEVASLLHSYYPAEKKLAQDKANVAKIKALLDAIKSLQHFVKPLLGKGDESDKDERFYGELASLWAELDTVTPLYNMIRNYITRKPYSQKKIKLNFENPQLLGGWDANKEKDYATIILRRNGLYYLAIMDKDSRKLLGKAMPSDGECYEKMVYKLLPGANKMLPKVFFAKSRMDDFKPSKELIEKYNNGTHKKGKNFDIQDCHNLIDYFKQSIDKHEDWSKFGFNFSDTSTYEDLSGFYREVEQQGYKLSFARVSVSYINQLVEEGKMYLFQIYNKDFSEYSKGTPNMHTLYWKALFDERNLADVVYKLNGQAEMFYRKKSIENTHPTHPANHPILNKNKDNKKKESLFEYDLIKDRRYTVDKFMFHVPITMNFKSVGSENINQGVKEYLHHADDMHIIGIDRGERHLLYLVVIDLQGNIKEQYSLNEIVNEYNGNTYHTNYHDLLDAREDERLKARQSWQTIENIKELKEGYLSQVIHKITQLMVKYHAIVVLEDLNMGFMRGRQKVEKQVYQKFEKMLIDKLNYLVDKKADASVSGGLLNAYQLTSKFDSFQKLGKQSGFLFYIPAWNTSKIDPVTGFVNLLDARYQNVEKAKAFFSKFDAIRYKRIRTGLSLISTMTSLVKKQKVQGLSGFYAPEECVLILSEIKKKTHNGIIRKLT

SEQ ID NO: 559 - protein, 1250 aa, Unknown
  source: /note="Description of Unknown: Cas12 sequence"
MISLNYFQNQYAVAKTLCLELRPIEKTMEYIISSGILKEDEHRNESYKLVKKIIDDYHKAYIELSLSRFELKITSCSKNDALEDFYCQYLANSQEEKDKNIFKKTQDNLRKQIAKHLTQGEAYKRIDKKELIQEDLLEFVAADPDAANKKILINEFRDFTTYFTGFYENRKNMYSEEAQSTAIAYRIIHENLPKFIDNMGTFKQLMQSSITDILPQIFDNFKKDLEVSSIQEIFDLNYFNKVLTQKQIDIYNAIIGGKSLNENSRIQGLNEYINLYNQQHKENKLPLLKLLFKQILSDRNSLSWLPEAFETDKQVLHAVRKCYANLKESVLHEAGLVQLLSSLPSYDSTRIYIRNDQALTTISQKLFGDWGIIPHAIKERLKKDISAKRKETEEAYLERIEKAFKQADSYTIAYINDSLKEIGVDKKNIEDYFIHLGAICTEGQEQENILQRIASAYSQAQPLLEEKVPVHKNLMQDKDSVELIKSLLDELKNLQHFIKPLLGKGSESDKDERFYGEFVGLWNELDQITTLYNKVRNYVTRKPYSIEKFKINFQNATLLKGWDRNKERDNTSIILRKNGLYYLAIMRKEYNKVFEKYPAGTEENCYEKMEYKLLPGANKMLPKVFFSKSRINEFNPSPQLLQNYQMGTHKKGDQFKKEDCHALIDFFKTSIEKHEDWKNFNFQFSPTSVYEDMSGFYREVEQQGYKLVFRSIDAEYIDKLVEEGKIFLFQIYNKDFSPFSKGTPNLHTLYWKMLFDERNLNNVVYKLNGEAEIFFRKKSITYTHPTHPAEIPIKNKNVQNKKKESVFQYDLIKNHRFTIDSFQFHVPITMNFKNAGLSNLNEQVYTYLRENKDAHIIGIDRGERHLLYLVVIDRYGRIVKQFSLNEIVNEYHGNTYTTNYHDLLDKREEARQQARQSWQSIENIKELKEGYLSQVVHKIANLMVEYHAIVVLEDLNIGFMRGRQKVEKQVYQKFEKMLIDKLNYLVDKKKAPEADGGLLKAFQLTNQFESFQKLGKQSGFLFYVPAWNTSKIDPCTGFTNLLDTRYENIAKAQKFFRTFDAIRYNAVKDYFELELDYDKFHKRAEGTQTKWTLCTYGTRIKTFRNPENNNQWDNVEINLTEEFKKLFKQFGINLSGDLQQAICAQTEKSFFESLLRLLKLTLQMRNSITGTDVDYLLSPVQNAEGYFYDSRKGDKSLPANADANGAYNIARKGLWVIQQIKQTPQGQKAKLSISNKEWLKFAQEKPYLKD

SEQ ID NO: 560 - protein, 1193 aa, Unknown
  source: /note="Description of Unknown: Cas12 sequence"
MKTFENFTNLYSLPRTLRFELKPLYKTKELIDSKQELFPKDKRIDEIYQNIIKPCLNELHSDFIEKSMENKDFQNIPDNILKIYSNEKNIDDFKNIEKDLIKQINWFLKSNKTFFAENYSDLLGKNSIDIIIKVFWEKIYKKDDSWKIFLYNDLLWKSYEELINIYFKWFSTYLSNFNKNRENLYDKKNEAKVWSVSGRTIWENFPRFLQNCINFRDKLEKLNLSIEQKDIFITNNFWKCISQKQIDYYNKIIWQINSKTNEFNQKNGLKWNKKLPKLLLLHKQILWKSENENILNFINNIIQTDFELEQEIKIINKDIFQRIDFIKKSIVSNIEDFELEKIFIKKNRLKDISSLLMDNYSVLEKLLPEFNEEWKIIKENELVNLSKIKKSFENIDLKDLKNIFKKEYFDESKDWFKLFLNWIYNHFSDLENNIKHTHKLVQDKLISWNFSENIQKSEKNINLRDEIFVSSKWLLKAYLDSILALDRFVHMFDYWEQKDFDSNFYNNIEEYSINFSPFKTYNAVRNYLTKKNYSTDKIKLNFDYPDFLGSNSLWKYAFIYKDSKWFYYLWVLDHSNSQSKYKPQILKNNTEFYQLEYKQIKFNTLAWKWYIRDFWVKYSEDENCIINLKTLIKKQYLERYPVLKEIVDFQTDDKKIFDAKVKTILEQAYSINFVNIDKNYILEENNNWNLHFFQIYNKDFSENKKINSMENLHTMYFKALFEKENFNWWACFKLNSQWAEIFFREKSINEKKVKDLKTRNENAIEKKRYTENKVFLHLPITLNFINKWYSKYSFWYINDSVKKYIKENKISIIWIDRWEKNLIYFSMINENLEIIELKSLNSLILKVSDLEEKEVNYFEKLSKKEWNRNKERKDWDEIETIKELKEWYISQIVDNLVKLIVKHNAIVVMEDLNSGFKRWRQKIEKQIYQKFELALAKKLNFTVDKNKKHDELWWIYKAYQLTPQIENFQDIYSQTWIIFYTQAAYTSVTCPNCSFRKNIYQKYENESKFKEFFKKYILEIKFEDNCFIIKYKIDEKIDKKKNKLKKLEFQVNTKNQIRLKFEKSLKWKWWETKEFNITEKFKEIFEKHKLDLWNLKEELLAWNWEIQLYKDFMFYFNLLLQLRNSKENDNWWYISCPSCWFHSGNWFQWFSYNWDANWAYNIARKWRIILDKIKKDEKNLWITNVEWDNYYQK

SEQ ID NO: 561 - protein, 1202 aa, Unknown
  source: /note="Description of Unknown: Cas12 sequence"
MAVRSVKLKLLVPRDGSAESVRKRKALWATHQFVNDAAAAYAELLLEMRQEDVCRGTDDHGKDVIEPAAHWQAKLRARLAAKQLPPVAVAEALPLLKAFYGSRLIKSFVANDKGVAGTGNATDLNTWLSGLVDPASVAGEKTELRKQLLAELPLCEAADADFEGAARKMLAKSDAREALLEGPGTGVGWPAAYNANPTDSVWLDMLHKAAAKARLELADTTVSELKKLGVFPLLQAASSNRVFGSGVLNPFERMAAAQAAAALLPWETKRHEMRKRRDKFADQLNQWDTEFGASHATALAAIRAFEAEESERARRESLGNEGTGYRIGGRELRDAWTLLRDWLKGHSTATAAAREDKVRELQAKQGRSFGSHRLLSWLAKPAQQWLADHSAGDVVTRIAVRNARQRKLDTARTLPIWTGADAVKHPRFANFDPPNNTNQPGFDLRAGTQKGRLTLRLSLLTERADGLLLAQDHDFQLVPSRQMAEIVLHKDGKERALSWQSQDGIGRQVGDVGGSALLFSRDHAECLLERKQITRLERGAWPAALPVWFKLSLDIGAEHKALLKQRFKWGVWLNSALVTRNAKDAKGVPPPVGTRVLAVDLGLRSAATVSVWQVVDAATPVVAGKWRVPLSDTLSAVHERSAMLALPGEHVDAGVLAARRAANEKLAGLLAATSHLSTVFKLGRAEQGDRRRELLERLGEGDDRRARAAVATTAAERDGLRAVLGATQDAWAGAVAAVWRRLETDLAGAIAAYRKQQREDVQLRREARHGPGASQLPKQAAAERLLGGKSAWQIEYKERVRKLLTRWIMRQRPGDTAVRRLARKDLGKYCGGLLDHLTALKEDRAKTTADLIVQAARGRVRAHKDAHGRQQDRELWLAKYAPCDLIVMEDLGRYRFATDRPPSENRQLMQWTHREVFRLVQMQAEVEGIQVLETGAEFSSKFDARTWAPGVRCEPITKLWVERYRNGEMPWLADKADEWRREGIELAQLVPGQLLPTGSGEQFVAVSATGGLRVRHADLNAAQCIALRALTGHGTAFRLTARRLGDVFVSAKGLGKRPQGALWREFGSALPPAVVVLRPAGEVRYALRPFASARDAAAALGLQLGALRNVDATDAESDAEDGDLAELLAGADPDRATFFRDPSGDVHGGAWVQAKVFWAEVRRHVRLGLQAQGLLPAAARSSEPRQMQLPLAGALPGDDIPL

SEQ ID NO: 562 - protein, 669 aa, Unknown
  source: /note="Description of Unknown: Cas12 sequence"
MLDKFASLYPVTKTLRFRLLPQGRTEENMQVAKVLENDLERSEAAAVVKGLIKKYHLQFISDTLSGSTLSWQALTETLDKFKADHTATAELDSALAAYRCKLAELFTKSPKYKVMATPVSIIKEILKTETDPENIAALNKLNGYTYIIFDYVSTRMLTYSADAKATSLAYRLVDENYLRFYQDISAAAEISAVLEEAGFDNAEVEAFIRTDYNTCLTSEGIASFNAAAGSINQFVNVLLQQNPVLQSEPALRRHLQPLYKMLLDEAESKIIKFEDYGQLRDAVENFRRNFQDLPQSLIDIFAGRYDYSKIYVGYKYLNEASSQIAGGYNWKLLENALEDFYSKPYLVNGKLPVKYKTVVNKKMNQLAYSFTELQEALDAGDSGSSITDLFGKYAELHAAYAAADGNVFYKEYDRKSIASLKNYLDAVNAIARFIKIFAAPEVYVKDEGFYGIVDGAADKLRDFDLLYNMVRNYITKKPYKKSKVALTFNSSSFGRGWDENKIYDELTTIFTYNGKYYLGVINKNDKPDLAAAVSKDEGGYKRMVYKTFDIVKQLPRLSFTKAVKAHFAESDEDFIFDGPKFAKPLRVPKEIYLQSFTDNGDKLADSAKKYTKAYLDMSGDYKGYYEAIIKRIDYTKEFLSAYKSTSIYDLAFLKPAGKAAGSLCWTRHI

SEQ ID NO: 563 - protein, 1193 aa, Unknown; identical to SEQ ID NO: 560
  source: /note="Description of Unknown: Cas12 sequence"

SEQ ID NO: 564 - protein, 1583 aa, Unknown
  source: /note="Description of Unknown: Cas12 sequence"
MSFLVPHLPTVVSHRLGGYSSAMDQTPTRLTPAVKNTAAATPKPEVPLTQRAYTLRLRGANDGDQSWREAVWATHEAVNMGAKVFGDWLLTLRGGLDRELADAKVKAGNNNPDRNPTPEERRGRRVLLALSWLSVESAPKKGDAYEKFVIASGKKDSQSIRDEKVVRALREILAKRGVANQDLEGWIVDCEPSLSAAIRDDAVWVNRSAAFDAAQCRVGTSLTREEIWDLLKPFFGSCESYLASLTTDEDSDTEAAATDDKAKDLVQKAGQWLSSRFGTGKGADFAAMSKVYSETAFWAGRASPFRSGAEALRLIAESLKSFCPKSFDADGILGLISGPGYKSATRNIIKAWSKRAGPVTADDLANLSAVAAEDANKCSANTGSKGHRPWSDAILCEVENACGFTYLQPDGPALHSEFAVMLDHAARRVSIGHSWIKRAEAERDRFTKDALRIKEVPDPIRVCLDRFCADRAGTSGAIDGYRIRKRAVSAWKEVITRWGQAACKTAEDRVIAVRETQADPDIDKFGDIQLFEALAVDDAECVWRVNGEVTPQPLIDYAAATDAEAKQKRFKVPAYRHPDPLSHPVFCDFGNSRWKIRFAAHDAVTKLANARTSLDRREADLAKAKERLDKATAPEEQTEGKESLEEAERHLRDARDRVAWLSSMHAFSMRLWGAGRVGDGQRLFWSCKRLTDDMALRQNSGQAPTIAVTRADRLGRAAAGADTADSVDILGVFTEEHWNGRLQAPRAQLDVIAAHVAKNQWDAKAKKMRDRIRWLVSFSAKLQPVGPWIEYSATFPEAALAKPFVSRKGEYAVRHVSNDDRAGLGKLVLSRLPGLRVLSVDLGHRYAAACAVWETVSIAQTNAACDAAGHELPTESDLFLQLSTTDLTGKNRTTIYRRIGADMITDPKTGEKTPHPAPWARLERQFLVKLPGEDIPARKASPAEFDAIRRLEEAFGRTRTADDPLLVRVDELLAATVDSARLALRRHGDAARIAYAFKPSAEKLTPGGGREVMSPEARKAMILDALLLWHGLWHGDRWADVWASQQWDAYIKPELGMDLPPWSETSGEPRCQYRSKVEGLLKRVAESLAARDGAGLHLLWAEQWRTRNAKWLGNTGHLRTLRSLLLPRGLTTSTPAAWNVGGLSLTRIATLKSLYQLHKAYHMRPEPEDPRKNVPAKGEEELRDFGRGMLDVMERLREQRVKQLASRLAEAALGIGRMKASEGKRDRKRPRAQIDQPCHAVVIENLKNYRPEETRTRRENRQLMSWSSSKVKKYLSEACQLNGLHLREVQASYTSRQDSRTGAPGIRCADVPVQDFFTKPWWRRQVSIAVGRVNQGRGDARERFLADLDAKWSAAEKSERITAPPLRIPVNGGELFVSADLHSPAALGLQADLNAAANIGLKALLDPDWPGKWWFVPASLDADGWRVPAAKSCAGAEWVKNWKVGQLGDSYAPNGKPLQPTDDEGVKKAEDGVKLAKASLDDAEQALKAAKKTKRKAEIDVASARAQEAKKNVDDMKKALVAAKKGASAKEIINLWRDPVGVDPADFASGEPWRAYTVYKQRVEYHVINDVLRGRAGPRSDRP

SEQ ID NO: 565 - protein, 1254 aa, Unknown; identical to SEQ ID NO: 36
  source: /note="Description of Unknown: Cas12 sequence"

SEQ ID NO: 566 - protein, 1468 aa, Unknown; identical to SEQ ID NO: 34
  source: /note="Description of Unknown: Cas12 sequence"

SEQ ID NO: 567 - protein, 669 aa, Unknown; identical to SEQ ID NO: 562
  source: /note="Description of Unknown: Cas12 sequence"

SEQ ID NO: 568 - protein, 677 aa, Unknown
  source: /note="Description of Unknown: Cas12 sequence"
  MOD_RES (19)..(339): Any amino acid
MCIRDRDLAVAALNRGDAXXXXXXXXXXXXXXXXXXXXXXXXXXXXXXXXXXXXXXXXXXXXXXXXXXXXXXXXXXXXXXXXXXXXXXXXXXXXXXXXXXXXXXXXXXXXXXXXXXXXXXXXXXXXXXXXXXXXXXXXXXXXXXXXXXXXXXXXXXXXXXXXXXXXXXXXXXXXXXXXXXXXXXXXXXXXXXXXXXXXXXXXXXXXXXXXXXXXXXXXXXXXXXXXXXXXXXXXXXXXXXXXXXXXXXXXXXXXXXXXXXXXXXXXXXXXXXXXXXXXXXXXXXXXXXXXXXXXXXXXXXXXXXXXXXXXXXXXXXXXXXXXXXXXXXXXXXXXXXXXXGQLNAIRNFLASDGYGAHDLVPVNYNGSNDRGAEVQVGNQKNWTVTSSAPVVVQYNNADTTLTVQGHTDRLIVTGSGNDTITLKDSGDDKVLLGDGNNTVVAGSGADTIVGGAGNDVLIGTNGGYGTELLGGAGNDVLRNAGSHGIYMDGGAGNDTFYGGTGPDTMEGGDGNDLMYANGRGSSIDGGAGNDTIYGGPGGDTLTGGDGNDLLRSDSAFGTKGSGNLLVGGAGNDTLWAGAGYDTLKAGSGSDTLISGTGSSQMIGGSSGNTTFEVAYHTGNDTITGSGSGNTVYLDGRDFSDATISNHSGVTTVSFSDGQVLKISGVQDIVFSDHDYKV

SEQ ID NO: 569 - protein, 1254 aa, Unknown; identical to SEQ ID NO: 36
  source: /note="Description of Unknown: Cas12 sequence"

SEQ ID NO: 570 - protein, 767 aa, Unknown
  source: /note="Description of Unknown: Cas12 sequence"
MAQASSTPAVSPRPRPRYREERTLVRKLLPRPGQSKQEFRENVKKLRKAFLQFNADVSGVCQWAIQFRPRYGKPAEPTETFWKFFLEPETSLPPNDSRSPEFRRLQAFEAAAGINGAAALDDPAFTNELRDSILAVASRPKTKEAQRLFSRLKDYQPAHRMILAKVAAEWIESRYRRAHQNWERNYEEWKKEKQEWEQNHPELTPEIREAFNQIFQQLEVKEKRVRICPAARLLQNKDNCQYAGKNKHSVLCNQFNEFKKNHLQGKAIKFFYKDAEKYLRCGLQSLKPNVQGPFREDWNKYLRYMNLKEETLRGKNGGRLPHCKNLGQECEFNPHTALCKQYQQQLSSRPDLVQHDELYRKWRREYWREPRKPVFRYPSVKRHSIAKIFGENYFQADFKNSVVGLRLDSMPAGQYLEFAFAPWPRNYRPQPGETEISSVHLHFVGTRPRIGFRFRVPHKRSRFDCTQEELDELRSRTFPRKAQDQKFLEAARKRLLETFPGNAEQELRLLAVDLGTDSARAAFFIGKTFQQAFPLKIVKIEKLYEQWPNQKQAGDRRDASSKQPRPGLSRDHVGRHLQKMRAQASEIAQKRQELTGTPAPETTTDQAAKKATLQPFDLRGLTVHTARMIRDWARLNARQIIQLAEENQVDLIVLESLRGFRPPGYENLDQEKKRRVAFFAHGRIRRKVTEKAVERGMRVVTVPYLASSKVCAECRKKQKDNKQWEKNKKRGLFKCEGCGSQAQVDENAARVLGRVFWGEIELPTAIP

SEQ ID NO: 571 - protein, 1210 aa, Unknown
  source: /note="Description of Unknown: Cas12 sequence"
MNIIMENFEKFVNLYELSKTLRFELIPFSQTKVELEKDWIIEKDREIEEKYHIIKEKLDTLHIKFVWQALEWVDLSLLEEYAELYFACKKDTKNKKLKSKFEKLEKKIRQEITSFFDAEWNKWKEKYGFLKKWWTSFLTEKEILDVLIDIFPENKDDFEIFKWFFTYFSNFNESRKNFYKDEWKAGQIATRAIDENLTTFLENIIKYKNFKKENPDFFTENEEKVFELDFYNFCLTQKWIDNYNEIIWAKSLEEWKNTQGVNQRINLLKQKNEKSNKKNLSYPKFDILYKQILSEKSENDFIPNIENTEELFTVIQKSIKENDKKITEIDKLFKKFFLEENNIDIWKVYISKQAVNTISSKYFENWSSLWWYLWENSKKKYFSLWEIKEALEDIKEKNIFKGEYYNNKIAFENKSNFENFLAIFYYEFQTNLSLLNWNQNNLESLQEKEFKKEEKQVDIIKKYFDSVMDLYAMSKYFFVDLKQAKNFPKDIEFYNDFDLYFSDYEPWKVYNLVRNFLTKKEVKTDKFKLNFSNSQFLTGWDKDKEKERFWVILRKNEKYFLAILKKNNNKIFENYRENNPTDFYEKMEYKQLNNVYRQIPRLGFPLQKKLDSLKWKELEEYLEKYKNNFWYNKEIAFIKEEFDIFQKNKEKWEKFDREKLKKLIDYYKKVVLEKYSDLYDLKKLENTDYDELVNFYDDVEKSMYSLHFTKIETEFLENLEKNWEIYLFQIYNKDFSDYKKENTKENIHTKYFKHLFSEENLENLKIKLSGWAEIFFRDKTHNLKQKLDKNWKKMFYWENKDKKVLEHRRYAKDSYGFHISITLWANNWDMYKFNQFFNKNFTPKHIIGIDRWEKHLAYYSVIDLEGNLVETDTLNIVNGINYLEKLENIEKSRMQERKSWWEIENIKNLKDGYISAVVSKLTELIEKYQAIIVFEDLNLGFKRWREKIERQVYQKLELALAKKLNYLTFKNKKDCEIWGVLNGIQLVPRVKDYQDIANYKQSGIIFYTNPAYTSTTCPECGWRKTLKFPSKITKTSILEFFKEIQMSFYWEKFSFTYENILWKSETLFSNVKRTQWNNKSRKIEHKENITQELKSVFEKYNINLWENISEKLQQTDMLLEDLKVLFYNFKLINNIRNSDSKLEEDIISCPCCLFNSENWFKGAYFNGDANGAYNTARKGIIMLENIKVNPERSNLFVRNEEWDEFLREEF

SEQ ID NO: 572 - protein, 1187 aa, Unknown
  source: /note="Description of Unknown: Cas12 sequence"
MSKLFENMTNLYSLNKTLRFELKPVGNTRELIESKDFFKNDEEKAENYQFMKEKMDKIHRNYIQKSLETIKMLPILDQTEQKRLKKEDIKNELKSLRSFISAAFVSVKDLLSNKIIEWLISEASIEEKEKIKKFDKFFGYFKTYVQNRGNLYKAEDKAGQIAFRLIDENLPRFFKAKQIIEEIIKKTPDFVVKERNEKQEETEKKITEYLSIFYLNSYCHYLSQSGIDLFNEIVGHINLSINLYKQKTGVKFSLIPLLYKLPLAPRKQISRLPKQIENPEELELIVKSVLDRIDQKINPFINNILQTVLEENSVYDLNWIYISIKTTEQWWSIGLSGRNSLRELGYNQSKNWEEPVLKAEKNKFPFISLGEIKSFLDAKQLAWDDIKSVFWEGKSQSLMNWSWSNIFFHLIGKEISSLIEKYLHSRKNYQISQSKENQKHVLDNSLSLWRLLGWFVLMHKKTHLTPEIKESFFYDWENGLDAIVFDENSDPIHTIYDKVRNCLTKKPYSNKDKIKVNFDCPYLLWGWDQNYDAFGWLIFHDWKKYFLWLIKGSWLNMEEKNKLYEWINPMNSITKIIYDYQKPDFKNVPRLFIRSKWDTFAPMVREYWLPVNDILYLYDNELYKPDKKNPWKHKSYLRRLIDYFKLWLSKHKSFKHYIFKRKESDQYENLAEFYSDVEFSCYAIKKEKVNFDQVKALCESERLYLFEIYNKDYNQFSKWKNKNLHTQYFEALFEERDNNLFMLSGGWSIFWRESNWKIVEKIRSYSPKYNIEIIDKRRYTKNKLMIHIPIVLNFCRNQEWRVNDMIKSLIQSQSNNFTILGIDRWEKHLLYYSLIRQDWTIIKTGSRNTITNKIKIVDYHKKLDDREKKRDEAQANWEQQEQIKDLKKWYISQVINEISKMIIEHNAIIVLEDLNGWFKRWRQKVEKSIYQQFELALAKKLNHLVFKNRWDTESWGTMKAYQLTPLVAQFQDLSFQTWVVFYTPAWYTSTTCPCCGWRKNIYFKYENEKQAKIELEKLNIVRENNYFSITYTAEWWNKKWKITWSVLNKTDRILTTKWQTRLQYDRASKNTKEYDITTDFNSVFTAKFLDYKIRLENAGSKQCRNLINSINLLLKIRNAKSGTDIDTIQCPACEFHSQWWFQWNEFNWDANWAYNIARKGKVIIDKIVKGEKNTTVSQIEFDNEIQK

SEQ ID NO: 573 - protein, 938 aa, Unknown
  source: /note="Description of Unknown: Cas12 sequence"
PAYRHPDPLLHPVFCDFGCSRWQICFDVRKNVRTTSPRRLCLTLFTGSGMELVPFSWQSKRLARDLALEQRHRNPEASEVTRADRLGRAAAGVSAGGAVSIKNIFNEENWNGRLQAPRSQLAAIAARVDKHGWDAKALRMLDRLRWLITFSPRLEPTGPWIEYALRIPDDAAAKPFLSRKNGFAVLHRSNDDRKGLAKLILSRLPGLRVLSVDLGHRYAAACAVWETLSADQVREACQAAGHDGPTECDLYLHLKKDGRTVIYRRIGADTLSDGTPHPAPWARLDRQFLIKLQGEEHKAREASNAEIWAVHQMEAALGRSVPLIDRLVASGWGQRTEGQRARLEALKQLGWRPVAEKLDSDDEPGVMEESPAIKPSLSIDELMSSAVRTMRLALKRHGDRARIAHYLITDEKTKPGNVKEQLDENGRIELLQDALVLWHDLFSSKGWQDNKAKELWYVHIATLPEYKAFQSSGEGHAGPERRGKPEEDREKLGVVAQALAPNVTLREALHNAWKKRWEEDDARWKALLRWCKDWILPRGEAANSPAIRKVGGLSLIRLATLTEFRRKVQVGFFARLRPDGKKAETGEKFGRKTLDALEELREQRVKQLASRIAEAALGIGKEHVFPTAKEPQKKCWCGSVHRKKDPKRPRERVHSPCHAVVIENLTHYRPEETRTRRENRQLMSWSSGKVKKYLAEACQLNGLHLREVNAAYTSRQDSRTGAPGIRCQDVPVKEFMRSPFWREQVAQAKKKQAEGKGDARERFLCDLDEQWKNRSEDEWKKAGPVRVPLRGGEIFVSADGTSPTAKGLHADLNAAANIGLCALTDPDWPGRWWYVPCDPASFKPIMDKVEGSAAVQPDQALRQPAQAQRGDAARDRKKRGKVGGRSREVVNLWRDVSSRPISPNDSWQEFTPYWNDVQARVVNILRQSAGLTRGQGEP

SEQ ID NO: 574 - protein, 1140 aa, Unknown
  source: /note="Description of Unknown: Cas12 sequence"
MPLRSINIKMRLKRAAEGRALRQSLWLTHSVVNCAVAEIERVLLLCRGRGYWTGDDEPVSAETVQQQALAFARETQARNGQPGIGGDAEILAALRGLYEAIVPSVNRDEQGRPLEGNAQAAGGFAGPMMDAESEGFQSVFDKILEPLPSWVAKMTGGTRGWEQESVQWLKSPESERLQHASGSPPAWVRRLRTGEPWQEAFVQDQENKRKEVKGVPSLIQRLKKELGLLPLMRPPITLQFEDKRSGLTPWDRLTLRLAVAHLLSWESWNHRAADEHGRVTERLARLETEAAPLASLIEGLREYEKIRHEELKRVAQANDENPFRIGARGVRGWDRVREAWLGATDDTKEGRFTSVAALQTKLGGRFGDPDLFRWLAEEGREHLWGEHDPLPILARLNALSRLLRRKKDHAIYTAPDARLHPRWTAYEAPGGGNLRNYSFEISGNDLALRLPLLRRVESGLEEDSQRAEIALAPSGQFQSASWKGDGKPNRHLTYYSAHEQFSAELGGAEILYRRRHLENRKVKELEQGDIGPVWLKLVLDVQPNAPEGWFTPRGRVVTPPTVHHFNTALVNRSKHAPDLVPGLRVLAVDLGVRTFAACSVFELVQGEPGNGMAFLADQERDLWARHERSFLLPLPGEAVDSQLLAARRAAYNQLGLLRRDLGRLKGILRLSVKETAENRCGSLEELLASLEDEWNRGNAPAIDVAALLSAKGCLEMPQPAWEAAIAGTYQAAERELGNRVRDWRRTTRPRTTGEDDRRQRRGYSGGKSAWAVEYLDQVRRLLQGWSLHGRSYAQIRRLDREKMGTFAAGLLDHINALKQDRVKTGSDLIVQAARGYLPTGKKGWIKQYEPCRLILFEDLARYRFRTDRPRRENARLMRWNHRQILTETELQAEIFGLLIGTTGAGFSSRFHARSGAPGCRTRLLTAEDLRSPTLAKQLELLAETQGIDPKCFRPGMQIPWDSGADFVTLDSEGKLVQIHADVNAAQNLQRRFWTRFRDAYRISAVEIKQDGRTSWYPDREGVRLRGALSTIVGGDGYARLVAADDDDGFVLEKVTRPHWRRAAGAQAESGDDVGLDEVALEMAEAMDTDLERGEGRLVFFRDPSGSVIRADRWYQAKAFWGQVRSRVTRALGLRRPGASS

SEQ ID NO: 575 - protein, 669 aa, Unknown; identical to SEQ ID NO: 562
  source: /note="Description of Unknown: Cas12 sequence"

SEQ ID NO: 576 - protein, 1236 aa, Unknown
  source: /note="Description of Unknown: Cas12 sequence"
MSRSIFSPFTNLYPIQKTLRRELKPLNENFQHDPALSALRNSEIPQRDEQREKDYQAIKPLLDEFHNQFITESLHSLEPQDRSDFILFYQTYQKKKKNKAEISEKELKSLDEEFESRTKALRNAIGTSFSVTAELRKSNPDYVSEKGKPFLTQKSYKILTEAGVLWLLEKKYTSDPEKLALIRRFGNFFTYFTGFNQNRENYYATDEKSTAVAYRAINENLLTFANNCELFEKLSVLSLSELEKKTFNPDSYSEYLTQSGIVFYNEMLANIRSKANLYTQEHKAKLPQPKLLYKQIWSPRGDTIPFDLIASEAEFQETLHTMIRETDQRIPEFNKLLEQIFEEKVDLSQIFFSKTSLNIISNRYFSSWHTLLEKGVELKLFKFKKNDEESFKLPAYLSLAELKELLESAPFQMAEKADADEEKHHQASLFKLQRENLHLEKSHSNWELLLKSMKSDFESFWTWEGEFWSYTLAKKALQSLSALESTNQEHKNLIKMLLDNALYAYRMLKWFKVDTSKLGFVPEGEFYPSLDQLLQDYPLPKWYDMIRNYLTRKTYSQAKLKLNFDCSTLLNGRDKNKEIQNLSVILRKDGKFYLAIMKKDQNKFFENSALYEGNLGTMEKMDYKLLPWANKMLPKCLMPGSDKKKYGASDQVLELYAKGSFKKSEKSFNLADLHTLIDFYKLALPKYEDWKVFNFQFQATENYQDISQFYREVEQQGYLLNWRKVNEKLIKQGIKDWSLFLFQISSKDFEGKSKTPDLQTLYWQQLFEFSTNVKLNGEAEIFFRPWSMKKEKKKLKVDNYDVFKHKRYTEDKILFHVPITLWFGNNEVSPSAPSKFNQKLNQELIIPHFDDLHVIGVDRWEKHLAFYSVVSVKTGKIVKQGTLNLLNGTDYEAKLSQKAENRLHARQNRDTIEKIADLKNGYISQVVNKLVELVLEYNAVIVFEDLNAGFKRGRQKIEQSVYQKLELALAKKLNFIVKKEKAVGEPWSVTSAYQLAPQINTFWDIKWKQRGIMLYTRANYTSVTDPLTGWRKQYYFKKGSSEEMKAQFFKSFKNLTRDAGQEAYIFDDGTWLLYSNVERRRGKRGDHRERTQIKYDPSLELDTLFSKYQIEKSDSLFDQLKNRELPQTFWTSFFRIIDLIMQIRNTDDEGRDIILSPIGNPQERFDSRKRYNQLPRDEKGGIIEESAFEYPTSWDANGAYNIARKGVMMLERIKENPEKPDLLIRDAEWDKKITRK

SEQ ID NO: 577 - protein, 1333 aa, Unknown; identical to SEQ ID NO: 56
  source: /note="Description of Unknown: Cas12 sequence"

SEQ ID NO: 578 - protein, 926 aa, Unknown
  source: /note="Description of Unknown: Cas12 sequence"
RPGASAALSLTPLKTLFSENFSSFMCGNWQIINDSLKTYYNENIKSKGKAKEEKVKKAIKAIEYKSLADINQLVERYNNDELNRKAEEYISAINEKIKDLDVNEIEYDEKINLIENETKSEEIKSKLDSIMEIMHWTKMFIIEEEIEKDVNFYNEIEEIYDELQPLVTIYNRIRNYVTQKPYSEEKIKLNFGIPTLANGWSKTKEYDNNAIIMIRDGKYYLGIFNAKNKPDKKIMEGHQSEENGDYKKMIYRLLPGPNKMLPKVFMSKTGIAEYKPSQYILECYEQNKHIKSDKNFDIKFCRDLIDFFKTSINRHPEWSKFNFKFSETSEYEDISTFYREVEKQGYKIEWTYISEKEIKELDENGQLYLFQIYNKDFSEKSKGKENLHTMYLKNLFSEENLKNIVLKLNGEAEVFFRKSSIKKPIIHKKGSVLVNKTYNENGERKSIPEEQYTEIYKYLNSIGTNELSEKSKKLMEEGKVEYYKANYDIVKDYRYSVDKFFIHLPMTINFKAAGFSPINNIALKNIALKDDMHIIGIDRGERNLIYVSVIDTKGNIVEQRNFNIVNGIDYKEKLKQKELDRDNARKNWKEIGKIKDLKEGYLSLVVHEIAKLVVKYNAIITMEDLNQGFKRGRFKVERQVYQKFETMLINKLNYLVDKDLAVDQEGGLLRGYQLTYIPESLKVLGRQCGYIFYVPAAYTSKIDPTTGFVAIFNYKGMTDKDFVTSFDSIKYDDERGLFAFEFDYENFVTHKVEMARNKWTVYTYGERIKRKFKNGSWDTAEKVDLTYQMRSILEKYEIEYNKGQDILEQIEELDEKAQNGICKEIKYLVKDIVQMRNSLPDNAAEDYDAIISPVINNNGEFFDSTRGDEDKPLDADANGAYCIALKGLYEVMQIKKNWNEETEFPRKELKIRHQDWLDFIQNKRYL

SEQ ID NO: 579 - protein, 1466 aa, Unknown
  source: /note="Description of Unknown: Cas12 sequence"
MQCGSLRHNSKSLDSALAYPARLTTGGNEGKTSEAHIENDSLPEITRRPSRLARDFAPSNPFPFMKRIYQGQITGMQFHGAAGEQAVPANQNWEQALWDHHGLFHDAVNYYLVCLLALARPGNPVYAIREKLDAHNGAEPDELMVWRTFRRRGCNRPGLRDSVAKYLTPGNDEPTTEECFAAVLAGNPLGATEEGRAILNEGLAQLLGKCTGESGCRNSAKEYLPRFTKPDFKGNFEEDTARLNRAEASKRLPFYLHDPATTPNSPALDEFGVLSIALPNPKRAELTGAEARDKLLEFSREWSARLPDGSADWRRLEAKITALGDSLAIPGYTSGSAKGENRFQLYAMFLFCFVEKSDFTLGLLRQTTRRPVEGEEPPPRSNHSATAGDPIRIARGGRGYVFRAFTSLKQWGGDTGGDLKWPKFDMAAFCEALKALHQVEAKAKQRAEERSKKQALLDYQRGRIRRFKPTANSEDATPPPVLAGDPRISRLEQLLNTDLQDEYEMSEGVAVAYGLHPRTIRGFREIRKRWISAVGNAPFSEAARATLIACVRSFQSENPGTVGSARLFEALAEESNWIIWREPSAAEQQSWRENADLPESAEFALDPLQALTDERELKDEIERLSGPIRFTPADAEHSRRQFYFSDVSQIDKRNRFRPRLNEVEVELAVRPNGHWTNVWVTLQYSAPRLLRDQLPTADEAGGGWQQAMMAALNLRAPLKKGGEAVSFADCAALSLMPDISPDGEKRLLLNFPVELDGEAIANQLGRSKRWETLQFGGADDESYWLRWPKTWIDETKVRRKAAPPKWWLSKEPFSVLGVDLGQRDAAACALVQVSPGNCPTGVCRHVGSADGVDWWATVRSMNMLRLPGENAKVMRDGRFQEELSGSRGRSASIDELKEAGDICARLGFVADTILGANGRALSFPELNDRLLFSLRSAQSRLARLQSWSCVAHADVPPARREGILRDISEAKDDPLGLKPLATAGNLEAIASTLREVILQERTSISAQLVRVADRILPLRGRRWEWVARPESPSNHMLRATAPDTDPRRKLVAGQRGLSLARVEQLESLRQRCQSLNRALMQVPGTPSKLGRRSRGVELPDPCPDLLDRLDALKEQRVNQTAHLILAQALGVRLRIHQVSGPQRTRSDSHGEYERIPGREPVDFLVLENLDRYLASQGRSRSENSRLMKWCHRAILLKLKQLCEPYGLRVLETPAAYSSKFSSRDGTAGFRAVEVTPDDLGSHRWRKHSERLADPGASLSRDEREESTRLMAFAERLKALNQDLIARQEAARSSNQPFRPKWRTLLAPQQLGPIFVPAVGKPLQADINAAINIALRAIASPDVDDIHLRIRAARSGDKFVVRAENTRERARWGSAEAEIGLPTGAGAKEIEERRSLLTEARVNFFFDPASVAAFDHGKVRDAKLAVTSGRGLWGTLRREEWAIVGKINNDRLAAHGLGRPFAERVDL

SEQ ID NO: 580 - protein, 1464 aa, Unknown
  source: /note="Description of Unknown: Cas12 sequence"
MSQRDPLPSPTPRAYTLRLSTPDADNGAWRERLWKTHEVVNSGAEAFGDWLLSLRGGLDHRLVAVKVRVGRGASKTEREPTEDERRERRIVLALCWLSVESKKGAPQGRVVEDPVDALKRILGQRGLSEADAEQWVFDCRDSLSATIRDDATWVDRSAAFDETVQRLGSSLTREHAEQVIIEFFGDIHDYLALPKNMEEDGVTSPRGGSGKEFRTQARSWLSENWGAGQKGDKAQIVDALRKCSRCIAQEKPSTGSDLLRVLVRSLGGSPEETLRFDELRKLVGWRTGRRSTGAFALQRTVDMDRLSESDLESLEAKLTVEIDAKSPEASRSVPQWVESMRTAVEREVGMPFRSTRDLIGEFGVMLDHAARRVSATHSWIKRAEAERRKFEGDAAKLAQIPEEARQWLDQFCEDRSQELNALEPYRIRRRAVEGWESVVRTWAKADCKAEGDRVKAVRALQPEIEKFGDAALFEALAAEDALCVWLLDGKATPRPLLDYSAATDAQYRKRRFKVPAYRHPDALLHPVFCDFGESRWTIEFSAHRALGRRRKAQQLVDNKTVALQKAQERLRKAKAESSRSRAEEKVRAAEHALEAARKKLAFLQYRRALAVCLWTGKGVESTSLRWHSKRFAKDFAIGSSPEDGASTGVPVARADRLGRASANVPRGASVTISGVFEQKEWNGRLQAPRDALNAIAKVRDDETLPAADRSRRVQQMLSRLPWFVTFSARLVPQGPWLDYASEHSALGLRVDPKYWPHAEENRQRKGMARLILSRLPSLRVLSVDLGHRYAAACAVWETLSAQEMQRICREMGSAPPSPDDLYLHLRRADGNGKQRTTVYRRIGPDTLPDGGQHPAPWARLDRQFLIKLQGEDESARKASDSEIAVVKKFEADLGRPAMQRRSLRVDDLMSAAVRTARLALRRHGDRARIAFNLIADRRFRPGGAEEPLTDETRVDLLADTLATWHGLFSGGQCHDERAEEQWNEHIAPLLASSGASLSVPSDGDAVAATPARRRRKEVRGKLVPAAMELARRDLSQLSVLWVARWHQDDESWRARLRWLRDWILPRGAKADSGAIRHVGGLSVTRLATIRSLWQLQKAYRTQPEPEDPRKNVPKKGDTSLDDFGRTILDDLEHLRENRVKQLASRICEAALGVGVEQPNGGAKDPKRPQERRFSPCQAVVIENLTRYRPEETRTRRENRQLLNWSAGKVKQYLSEACELHGLHLREVSAAYTSRQDSRTGAPGIRCQDIPVVDFVRENGPCWGRLRSAQQSSGGTAEDQLLLALYERWSEKERTWRDQSGNVWAMDGEGRWVARNGTQLPQGSGLTPHPIRVPQRGGDIFVSAAPRSPAANGIQADLNAAANIGLWALLDPDWEGRWWRLPCSAMDLKPVKGSVNGSAVIHLDAPLKAAATKGAAKKDVVNLWRDISVRSLTEGVWRGYDAYWNLARYRVVQTLRPQVGIGSDE

SEQ ID NO: 581 - protein, 1247 aa, Unknown
  source: /note="Description of Unknown: Cas12 sequence"
MFKGDAFTGLYEVQKTLRFELVPIGLTQSYLENDWVIQKDKEVEENYGKIKAYFDLIHKEFVRQSLENAWLCQLDDFYEKYIELHNSLETRKDKNLAKQFEKVMKSLKKEFVSFFDAKWNEWKQKFSFLKKWWIDVLNEKEVLDLMAEFYPDEKELFDKFDKFFTYFSNFKESRKNFYADDGRAWAIATRAIDENLITFIKNIEDFKKLNSSFREFVNDNFSEEDKQIFEIDFYNNCLLQPWIDKYNKIVWWYSLENWEKVQWLNEKINNFKQNQNKSNSKDLKFPRMKLLYKQILGDKEKKVYIDEIRDDKNLIDLIDNSKRRNQIKIDNANDIINDFINNNAKFELDKIYLTRQSINTISSKYFSSWDYIRWYFWTGELQEFVSFYDLKETFWKIEYETLENIFKDCYVKGINTESQNNIVFETQGIYENFLNIFKFEFNQNISQISLLEWELDKIQNEDIKKNEKQVEVIKNYFDSVMSVYKMTKYFSLEKWKKRVELDTDNNFYNDFNEYLEGFEIWKDYNLVRNYITKKQVNTDKIKLNFDNSQFLTWWDKDKENERLGIILRREWKYYLWILKKWNTLNFGDYLQKEWEIFYEKMNYKQLNNVYRQLPRLLFPLTKKLNELKWDELKKYLSKYIQNFWYNEEIAQIKIEFDIFQESKEKWEKFDIDKLRKLIEYYKKWVLALYSDLYDLEFIKYKNYDDLSIFYSDVEKKMYNLNFTKIDKSLIDGKVKSWELYLFQIYNKDFSESKKEWSTENIHTKYFKLLFNEKNLQNLVVKLSWWADIFFRDKTENLKFKKDKNGQEILDHRRFSQDKIMFHISITLNANCWDKYWFNQYVNEYMNKERDIKIIWIDRWEKHLAYYCVIDKSWKIFNNEIWTLNELNWVNYLEKLEKIESSRKDSRISWWEIENIKELKNGYISQVINKLTELIVKYNAIIVFEDLNIWFKRWRQKIEKQIYQKLELALAKKLNYLTQKDKKDDEILWNLKALQLVPKVNDYQDIWNYKQSWIMFYVRANYTSVTCPNCWLRKNLYISNSATKENQKKSLNSIAIKYNDWKFSFSYEIDDKSWKQKQSLNKKKFIVYSDIERFVYSPLEKLTKVIDVNKKLLELFRDFNLSLDINKQIQEKDLDSVFFKSLTHLFNLILQLRNSDSKDNKDYISCPSCYYHSNNWLQWFEFNWDANWAYNIARKGIILLDRIRKNQEKPDLYVSDIDWDNFVQSNQFPNTIIPIQNIEKQVPLNIKI

SEQ ID NO: 582 - protein, 1250 aa, Unknown
  source: /note="Description of Unknown: Cas12 sequence"
MLSFNWVLFFFFSKMSRSIFSPFTNLYPIQKTLRRELKPLNENFQHDPALSALRNSEIPQRDEQREKDYQAIKPLLDEFHNQFITESLHSLEPQDRSDFILFYQTYQKKKKNKAEISEKELKSLDEEFESRTKALRNAIGTSFSVTAELRKSNPDYVSEKGKPFLTQKSYKILTEAGVLWLLEKKYTSDPEKLALIRRFGNFFTYFTGFNQNRENYYATDEKSTAVAYRAINENLLTFANNCELFEKLSVLSLSELEKKTFNPDSYSEYLTQSGIVFYNEMLANIRSKANLYTQEHKAKLPQPKLLYKQIWSPRGDTIPFDLIASEAEFQETLHTMIRETDQRIPEFNKLLEQIFEEKVDLSQIFFSKTSLNIISNRYFSSWHTLLEKGVELKLFKFKKNDEESFKLPAYLSLAELKELLESAPFQMAEKADADEEKHHQASLFKLQRENLHLEKSHSNWELLLKSMKSDFESFWTWEGEFWSYTLAKKALQSLSALESTNQEHKNLIKMLLDNALYAYRMLKWFKVDTSKLGFVPEGEFYPSLDQLLQDYPLPKWYDMIRNYLTRKTYSQAKLKLNFDCSTLLNGRDKNKEIQNLSVILRKDGKFYLAIMKKDQNKFFENSALYEGNLGTMEKMDYKLLPWANKMLPKCLMPGSDKKKYGASDQVLELYAKGSFKKSEKSFNLADLHTLIDFYKLALPKYEDWKVFNFQFQATENYQDISQFYREVEQQGYLLNWRKVNEKLIKQGIKDWSLFLFQISSKDFEGKSKTPDLQTLYWQQLFEFSTNVKLNGEAEIFFRPWSMKKEKKKLKVDNYDVFKHKRYTEDKILFHVPITLWFGNNEVSPSAPSKFNQKLNQELIIPHFDDLHVIGVDRWEKHLAFYSVVSVKTGKIVKQGTLNLLNGTDYEAKLSQKAENRLYARQNRDTIEKIADLKNGYISQVVNKLVELVLEYNAVIVFEDLNAGFKRGRQKIEQSVYQKLELALAKKLNFIVKKEKAVGEPWSVTSAYQLAPQINTFWDIKWKQRGIMLYTRANYTSVTDPLTGWRKQYYFKKGSSEEMKAQFFKSFKNLTRDAGQEAYIFDDGTWLLYSNVERRRGKRGDHRERTQIKYDPSLELDTLFSKYQIEKSDSLFDQLKNRELPQTFWTSFFRIIDLIMQIRNTDDEGRDIILSPIGNPQERFDSRKRYNQLPRDEKGGIIEESAFEYPTSWDANGAYNIARKGVMMLERIKENPEKPDLLIRDAEWDKKITRK

SEQ ID NO: 583 - protein, 669 aa, Unknown; identical to SEQ ID NO: 562
  source: /note="Description of Unknown: Cas12 sequence"

SEQ ID NO: 584 - protein, 1367 aa, Unknown
  source: /note="Description of Unknown: Cas12 sequence"
MNRIYQGRVTKVEILNGKNADGQPQELPNWQTALWQHHELFQDAVNYYLFCLAALASSASSPMGKLRNQLGSVWEPFGRTGRRFKGLRDSVGPYLLPDRPTPSIEEAFAAALAGNNSQPELLQLAVDALVEDLGGDAAIQQEGRGYLPRLCSPAYNGQFPRGANSLQKEAAKIRLPTLLHNVATSRNLDALAAELEFGFFANPVPNAGPIAGQEARNKLLEALAWLKAKDTRLTHSANELEKRIGVLPDSVSFPTYSGGSINKEALKHRFFAYLLFQHVERSLVTFEILRDSYPTPKPSARKSSKATPDTMAQLTQFGDDPVKLARGTRGYVFRAFTSLPCWGAKAPSDILWSEFDIAAFKEALKTANQFRLKTKERLDKADELAGELAWMNGEKSKFKPSEHSEQEPPAVLKGDPRFEVLKQLFEVELAEEHYLAEGESVIYGLHPRTLRCYRELVERWNKTVQPGEVFTEATSKKLVASTDKFQAENKERIGSVTLFKKLLERDYWCLWQTPDVQTVAARQKAGFSSNIIEDYQRYLELQTDIARLKEPIRFTPADAEQSRRLFMFSDLAGKSKHKHLPNATPYGFAVDVALAASEGGVWKETRVRLHYSAPRLRRDGLRKGVGEDLKRTAWLQPMVAALNLSEPAPQDFSKCAVSLMPDKSWKGLRHLLNFPVTLDPTVVQKAIGSQARWANQFVAFGKGATEQKFFLRWPEEVSASQKKAGPWWDALRAFSCLSVDLGQRDAGAFALLDVRANADWGKKPSRFIGEADGRNWRAALAAAGLLRLPGEDALVWRDGKWQEELYGEKGRLATKEEWLETNAIFSALEQNSEEWIGADPKRRSFPELNSKLLVVARRGQSWLARLHRWLWMLGDENKRERALRELLEQERQEAWRKRAEGKDLLALKQSLTAEIQRLNGLLPEQLVFLANRCLPLRNRKWAWNQHPDKAFAEKGCHLLEMVEAPSHLPLLAGQRGISFERIGQLEELRRRFQSLNRVLQRELGAPPKSGRELRDDLVPDCCPDILAKLDRVKEQRVNQTAHLIVAQVLGVQLRKHQTPESERTERDLHGEYEIMPGRKPVDFIVLEDLSKYLSSQARGRGENVRLMKWCHRQVTAKVKELCEPFGLPVLETPAAYSSKFCSRTGVAGFRGVEVTLKDRQSFPWSKRLEEDSAEVAELFGWLETASAGHKTKQPRCLLAPMSLGPLFIPVTSQAPIMQADINAAINLGLRAMAAPSVHEIHVRIRSEAKDGQFRVRAQSKREKARWGNEPPPIKMLVETQRVALAREGGHPNFFVDPLKAATFDRAEVEGLGLPVASGRGLWKSVRDAEWKRCREINLERMRRWGFIMEAPRTLQVSRKEDEDDLTF

SEQ ID NO: 585 - protein, 1202 aa, Unknown; identical to SEQ ID NO: 561
  source: /note="Description of Unknown: Cas12 sequence"

SEQ ID NO: 586 - protein, 1352 aa, Unknown
  source: /note="Description of Unknown: Cas12 sequence"
MSTQKNPFNQFTNLYELQKTLRFELRPVPETKKLLEKGEGKNLIQMDLEIDRLYEKEMKPMFNILHEKFINESLGLVKLDCKKLKKLENLLAEADKLRKQIKEGRKNKNNISEVEKRLKIIIGDNSQGKNKNGEIAVLQDELRVLIVKAFNLTADKWKKELNNKETLLPEKKGKRKIKIKKSGPKILQEENVLAILAYFNPDKADIIKKFAGFFTYFSGFNQNRANYYTVKALATGVANRAINRNFLIFLANRKDFARFKERLPRLAEFDNYFELENYEKYLSQTGIEEYNDQIGKIKQIVNLEHNQQQKDNKFQLKGLATLEKQIGCRTKKQREEGGDKSAPKFLEKVGLGFQVSQDDDGEYLIWECLNYINKELAGKLKSIKDNYQKFFADWRTGAYDLEKIWFRKEALNTISGRWFGGNNWFIIGKALALTGVGKFDKRENTYKIPEFVSLAEIKTAFEMLENGVNYDFKKSKKKKEGDDTDVVKYSADNLFKEEYKKKGLIKNSLFETMLAVWQSEIKRKFEQIFDGYKLEKDDVFGRKKGEWVEPFIENFQKVSQEKFDRGVKDENGRSIHTEVVKNLIEEGYLRLFQLTKYHNLDKKGERDPRPFDGNFYATLDEFWKDNIVVVYHKALQSTLTKKPYSEDKIKLNFENGSLLGGFSDGQERSKAGVVLKNKNKFYLGILIDRGFFRTDKANPVYDNAQNNEWERLILTNLKFQTLAGKGFLGKHGVSYGEMGKDNPMMAVEYLQKFIKLKYLDKYPALNEVAHKKYTIKKEFDADVKNALKDCFTMNFKPVDFGMIRQGLTESLFYLFEIVNKDISSQAKNGKNVHTLYWEALFGDQNLKKPILALNGGAEIFYRESQREKLEKKLDKSGKEVLDHKRYGQDKYFLHASITINYGQPKNIKFKEVINEKISQNADRVNIIGIDRGEKHLLYYSVVSPEGVLLEQGSFNQIETKNKVDIKAVKAEYGERGELKKVELVPTGKKVKYVDYQILLDYYEKKRNLARRDWQTIGKIKDLKDGYLSQTVHRIYQLILKYNAVVAMEDLNVEFKAKRAAKVEKSVYKNFEMALAKKLNHLILKDRRADEIGGALRAYQLTPAIPANDVGKFDKAKQWGIMFYVRANYTSTTDPLTGWRKHKYISNSEKIDNIQKFFSPGDGIQIDYDTEKQCFKFSYDHELEGGAKKHWELFACDGLERFYWDNRERQIKKYNLYEEFEKLLGGLRKEENINIQIDGVSEFRWKDLVFFWNLLNQIRNTDRSAQGDENDFLQSPVWSEKYNCFYDSRKAPNNMPNNGDANGAFNIARKGQLILERIKKCSDIPKFGNDNNGKNPENNYFISDADWDKFAQK

SEQ ID NO: 587 - protein, 1129 aa, Unknown; identical to SEQ ID NO: 3
  source: /note="Description of Unknown: Cas12 sequence"

SEQ ID NO: 588 - protein, 1352 aa, Unknown; identical to SEQ ID NO: 586
  source: /note="Description of Unknown: Cas12 sequence"

SEQ ID NO: 589 - protein, 1108 aa, Unknown
  source: /note="Description of Unknown: Cas12 sequence"
MAIRSIKLKLKTHTGPEAQNLRKGIWRTHRLLNEGVAYYMKMLLLFRQESTGERPKEELQEELICHIREQQQRNQADKNTQALPLDKALEALRQLYELLVPSSVGQSGDAQIISRKFLSPLVDPNSEGGKGTSKAGAKPTWQKKKEANDPTWEQDYEKWKKRREEDPTASVITTLEEYGIRPIFPLYTNTVTDIAWLPLQSNQFVRTWDRDMLQQAIERLLSWESWNKRVQEEYAKLKEKMAQLNEQLEGGQEWISLLEQYEENRERELRENMTAANDKYRITKRQMKGWNELYELWSTFPASASHEQYKEALKRVQQRLRGRFGDAHFFQYLMEEKNRLIWKGNPQRIHYFVARNELTKRLEEAKQSATMTLPNARKHPLWVRFDARGGNLQDYYLTAEADKPRSRRFVTFSQLIWPSESGWMEKKDVEVELALSRQFYQQVKLLKNDKGKQKIEFKDKGSGSTFNGHLGGAKLQLERGDLEKEEKNFEDGEIGSVYLNVVIDFEPLQEVKNGRVQAPYGQVLQLIRRPNEFPKVTTYKSEQLVEWIKASPQHSAGVESLASGFRVMSIDLGLRAAAATSIFSVEESSDKNAADFSYWIEGTPLVAVHQRSYMLRLPGEQVEKQVMEKRDERFQLHQRVKFQIRVLAQIMRMANKQYGDRWDELDSLKQAVEQKKSPLDQTDRTFWEGIVCDLTKVLPRNEADWEQAVVQIHRKAEEYVGKAVQAWRKRFAADERKGIAGLSMWNIEELEGLRKLLISWSRRTRNPQEVNRFERGHTSHQRLLTHIQNVKEDRLKQLSHAIVMTALGYVYDERKQEWCAEYPACQVILFENLSQYRSNLDRSTKENSTLMKWAHRSIPKYVHMQAEPYGIQIGDVRAEYSSRFYAKTGTPGIRCKKVRGQDLQGRRFENLQKRLVNEQFLTEEQVKQLRPGDIVPDDSGELFMTLTDGSGSKEVVFLQADINAAHNLQKRFWQRYNELFKVSCRVIVRDEEEYLVPKTKSVQAKLGKGLFVKKSDTAWKDVYVWDSQAKLKGKTTFTEESESPEQLEDFQEIIEEAEEAKGTYRTLFRDPSGVFFPESVWYPQKDFWGEVKRKLYGKLRERFLTKAR

SEQ ID NO: 590 - protein, 1125 aa, Unknown; identical to SEQ ID NO: 47
  source: /note="Description of Unknown: Cas12 sequence"

SEQ ID NO: 591 - protein, 1352 aa, Unknown; identical to SEQ ID NO: 586
  source: /note="Description of Unknown: Cas12 sequence"

SEQ ID NO: 592 - protein, 767 aa, Unknown; identical to SEQ ID NO: 570
  source: /note="Description of Unknown: Cas12 sequence"

SEQ ID NO: 593 - protein, 1202 aa, Unknown; identical to SEQ ID NO: 561
  source: /note="Description of Unknown: Cas12 sequence"

SEQ ID NO: 594 - protein, 1375 aa, Unknown; identical to SEQ ID NO: 35
  source: /note="Description of Unknown: Cas12 sequence"

SEQ ID NO: 595 - protein, 1496 aa, Unknown
  source: /note="Description of Unknown: Cas12 sequence"
MADDLSTQRAYTLRLQGTDPEDQSWRDALWMTHEAVNAGGRAFGDWLLTLRGGIAHELADTPVKGKKDITDELRKKRRILLALSWLSVESRRGAPDKFIVAGGEEPAGSRNEKVLQALKEILKRRGLSAEESESWMSDCRASLSAAIRDDAVWVNRSAAFDDAQVRIGASLTREDIWDMLDPFFGSREAYLTPAKKKKEDEDSSEGTGEEKAKDLVQKAGQWLSSRFGTGKGANFDAMAEVYSKISEWAGTAQEGVSGKEGIKNLADALAAFSPVSQNLEGVLKLISGPGYKSATRNLLGELDSLPVVSRDHLSALHEKAAEDTVKCKESTGTKGRRPYADAILNDVEKRCGFTYLTDSDNRSVSILDTSEFPSDYKWGTARHSEFAVILDHAARRISVAHSWIKLAEAERDRCEEDAAKVYDLPDKVKEWLDTFCSNRSDISGAQGEGYRIRRKAIEGWKEVVASWGRSSCITAEDRVAAARALQDDPEIDKFGDIQLFEILAQDEALCVWHKDGDVAKSPDAQMLIDYVLASDAESKKRRFKVPAYRHPDALLHPIFCDFGNSRWDITYDIHGARGKKKAKRGSKKEEAMPRGVAMKLWTGSDVLSVSLRWQSKKLAADLALDQEAEEVTDTAAVSRADRLGRAAAGIDRGAGVTIAGLFEEAHWNGRLQAPRQQLEAIAAVRDNQKLSSEERERRIAFMKDRIRWLVTFSAKLRPQGPWHSYAPTQGLQSDPKYWPHSEINKKRKGQAKLILSRLPGLRILSVDLGHRFAAACAVWETMSSEAIQEACRLANHQLPAPADLYLHLKRTVQKNLIDGEKTVEESTVYRRIGADRLPDGTAHPAPWARLDRQFLIKLQGEEKVREASNEEVWQVHLMESALGLSFPLIDRLVYAGWGGTEKQAARLEALREKGWKPTGTPADQDEEGGGYKPSLAVDELMFSAVRTLRLALKYHGDRARIAFALTADYKPMPGDTRYYFSEAKDRSSGADAAEREAKHKDYLLDMLLLWHDLAFSRKWRDEEAKELWNLHIAALPGYQAPAAPIQEEAGQGRKKAREEARAKMTPAAEALLADGTLREKLHGLWKERWEKDDAQWKKHLRWMKDGILPRGGRAATPSIRYVGGLSLTRLATLTEFRRKVQVGFYTRLFPSGEKREIKEAFGQTALDALERLREQRVKQLASRIAEAALGAGRVSRTALKQDPKRPEARVDAACHAVIIENLEHYRPEETRTRRENRGLMNWASSKVKKYLSEACQLHGLFLREVPAGYTSRQDSRTGAPGMRCQDVTVKTFLNSPFWQKQCVQAQKNKSTARDRFLCALKEAVAQGGMEEEKKMGPIRVPVPGGEVFVSADAASPAAKGLQADLNAAANIGLRALLDPDWPGKWWYVPCDRKTAYPAKEKVEGSAAVDVKQALPFVLPEEKENKGKTKGGKKGKGEVMNLWRDVSAEPLMTGQWLDYTAYRKEVENRVIQVLTAQLKARNPLRFGNLGDEEEIPY

SEQ ID NO: 596 - protein, 1108 aa, Unknown; identical to SEQ ID NO: 589
  source: /note="Description of Unknown: Cas12 sequence"

SEQ ID NO: 597 - protein, 1098 aa, Unknown
  source: /note="Description of Unknown: Cas12 sequence"
MPVRSINLKIVISRNTQGEKSRQSIWTTHAAVNDAVRYYEEQLLIMRGLGYHISDKDVVSKESIQQERLSRIRRAQLENGLPEPLGTDAELNSLVRKFYEFIVPSSVKEDGNAQQANGFLSPLTDPISIGYLSIFEKLGTIPDWVGQLKAGDPQAVENAKKWSATSAGIKRLSETGAPPKWKKLFLTGDPSWPQSFSEDIDKKIKEIEGAPKVICQLMEMGVLPLFPAYFADKLEGSDGSLSRWDRLAFRLAVGHMLSWESWCIKSAEDHFERKRRVESFSEKHTTPSLIICFETLEKYQKERQEKELGQNRSLPMQRPFRITRRQIRGWEDLRDKWLKNTTRTYDSLKSIASKEQTKKGGRFGDPHLFLWLAKPENHAVWDADEDALSIFAKMNAMRGLLERSRETAYMTLPDPIEHPRSIQWEAEGGSNFKNYVITHSPVEGLHVQLPLLCKSESGKLIDQTFEFPLAPSDQFKVAQISKTKSEVTITHQSVLDEEYRSKVGAADLLMDWPYLKNRRFESVEHGDIGPVFLKLSLDIERILPDGWTPKRPQAISHFSSASGNSKHKLSVVSGLRVLSVDLGIRSFGACSVFELSEHKPTSGMSFEIEGLNLWANHERSFMLNLPDEDVGNKGRQLQKTKDAELRAMRRVLGRYRKIYALAGIDPEDRKDILELLCQDQDIFEFERTIYKGLVTSTSVSQPLWEGKIKESLKALRNAFGRKVREWRRANRLNSNLKYAGKTMWAIQHLEDTRRFLHSWSHLGRFSGEIRRADRVKRGVFATRLLQHLDSVKRDRLKTGADLLVQSARGFLRDNQGNWKKSYAPCQVILFEDLSRYLMQTDRPRRENSQLMKWSHRSIPLEVAMQGELYGIHVCDTSAAFSSRYHARLATPGIRCHALRKEDLSNQFLIESLQKENPDIDFGICKAGDLIPRGGGEIFVSCDGNGGISRIHADINAAQNLQRRFWLRHGEAIRIPARKITLKGDEIWVPRSIGKRLQGAMSGCGYLIPTGHESGSCRWERITASKWESISRSSVAQKEEVNEDLLDIALLEEEALELSNEYTTFFRDPSGITLPSDLWFPMKTFWGMTRAKIKSAIKQ

SEQ ID NO: 598 - protein, 1130 aa, Unknown
  source: /note="Description of Unknown: Cas12 sequence"
MTVKSIKVKLRLDNMPEIRAGLWKLHTEVNAGVRYYTEWLSLLRQENLYRRSPNGDGEQECYKTAEECKVELLERLRARQVENGHRDPAGSDDELLQLARQLYELLVPQAIGAKGDAQQIARKFLSPLADKDAVGGLGIAKAGNKPRWVRMRDAGEPGWEEEKAKAEARKSTDRTADVLRALADFGLKPLMRVYTDSDMSSVQWKPLRKGQAVRTWDRDMFQQAIERMMSWESWNQRVGEAYAKLVEQKSRFEQKNFVGQEHLVQLVNQLQQDMKEASHGLESKEQTAHYLTGRALRGSDKVFEKWEKLDPDAPFDLYDTEIKNVQRRNTRRFGSHDLFAKLAEPKYQALWREDASFLTRYAAYNSILRKLNHAKMFATFTLPDATAHPIWTRFDKLGGNLHQYTFLFNEFGEGRHAIRFQKLLTIEHGVAKEVDDVTVPISMSAQLDDLLPGESNEPTELSFRDHGTDQHFTGEFGGAKIQYRRDQLDHVHRRRGARDVYLNLSVRVQSQSEARGERRPPYAAVFRLVGDTHRAFAHFDKLSNYLAEHPDDGKLGSEGLLSGLRVMSVDLGLRTSASISIFRVARKDELKPNSEGRVPFFFPIKGNDNLVAVHERSQLLKLPGETESKDLRAIREERQRILRQLRTQLAYLRLLVRCGSEDVGRRERSWAKLIEQSVDAANHMTPDWREAFEGELQKLKSLYGICGDREWTEAVYESVRRVWRHMGKQVRDWRKDVRSGERPKIRGYQKDVVGGNSIEQIEYLERQYKFLKSWSFFGKVSGQVIRAEKGSRFATTLREHIDHAKEDRLKKLADRIIMEALGYVYALDAERGKGTWVAKYPPCQLILLEELSEYRFNNDRPPSENNQLMQWSHRGVFQELLNQAQVHDLLVGTMYAAFSSRFDARTGAPGIRCRRVPARCAREQNPEPFPWWLNKFVAEHKLDGCPLRADDLIPTGEGEFFVSPFSAEEGDFHQIHADLNAAQNLQRRLWSDFDISQIRLRCDWGEVDGEPVLIPRLTGKRTADSYGNKVFYTNTGVTYYERERGKKRRKAFAQEELSEEEAELLVEADEAREKSVVLMRDPSGIINRGDWTRQKEFWSMVNQRIEGYLVKQIRSRVCLPESACENTGDI

SEQ ID NO: 599 - protein, 1333 aa, Unknown; identical to SEQ ID NO: 553
  source: /note="Description of Unknown: Cas12 sequence"

SEQ ID NO: 600 - protein, 606 aa, Unknown; identical to SEQ ID NO: 54
  source: /note="Description of Unknown: Cas12 sequence"

SEQ ID NO: 601 - protein, 1193 aa, Unknown
  source: /note="Description of Unknown: Cas12 sequence"
MKRIAKFRHDKPVKREAWSKGYRVHKNRIINKVTRSIKYPLVVKDEWKKRLIDDAAHDYRWLVGPINYSDWCRDPNQYSILEFWIDFLCVGGVFQSSHSNICRLAIQLSGGSVFEQEWKDLSPFVRANLIQGIKPAEFIGFLTAEFRSSSNPKNFISKFFEGSNEDLESLTNEFASIVDFIKAKDISLLRKSLPSCKKIAPNLWEKAVGSHSTNELLKLLTKYTRVMLVAEPSHSDRVFSQTVLQSNDQDDPELTGPLPSHKVGKASYLFIPEFIREVNLDKISKLDLSAKSKLAVEQVKKLSELTSDFKQIENQSEAYFGLSTSFNELSNFLGILIRTLRNAPEAILKDQIALCAPLDKDILKITLDWLCDRAQALPENPRFETNWAEYRSYLGGKIKSWFSNYENFFEIPQAASSQQNNNREKKLGNRSAIRALNLKKEAFEKARETFKGDKGTLEKIDLAYRLLGSISPEVLQCDEGLKLYQQFNDELLVLNETINQKFQDAKRDIKAKKEKESFEKLQRNLSSPLPRIPEFFGERAKKGYQKARVSPKLARHLLECLNDWLARFAKVEESAFSEKEFQRILDWLRTSDFLPVFIRKSKDPPSWLRYIARVATGKYYFWVSEYSRKRVQIIDKPIAQNPLKELISWFLLNKDAFSRDNELFKGLSSKMVTLARIMAGILRDRGEGLKELQAMTSKLDNIGLLHPSFSVPVTDSLKDAAFYRAFFSELEGLLNIGRSRLIIERITLQSQQSKNKKTRRPLMPEPFINEDKEVFLAFPKFETKNKVKGTRVVYNSPDEVNWLLSPIRSSKGQLSFMFRCLSEDAKIMTTSGGCSYIVEFKKLLEAQEEVLSIHDCDIIPRAFVSIPFTLERESEETKPDWKPNRFMGVDIGEYAVAYCVIEKGTDSIEILDCGIVRNGAHRVLKEKVDRLKRRQRSMTFGAMDTSIAAARESLVGNYRNRLHAIALKHGAKLVYEYEVSAFESGGNRIKKVYETLKKSDCTGETEADKNARKHIWGETNAVGDQIGAGWTSQTCAKCGRSFGADLKAGNFGVAVPVPEKVEDSKGHYAYHEFPFEDGLKVRGFLKPNKIISDQKELAKAVHAYMRPPLVALGKRKLPKNARYRRGNSSLFRCPFSDCGFTADADIQAAYNIAVKQLYKPKKGYPKERKWQDFVILKPKEPSKLFDKQFYRPN

SEQ ID NO: 602 - protein, 606 aa, Unknown; identical to SEQ ID NO: 54
  source: /note="Description of Unknown: Cas12 sequence"

SEQ ID NO: 603 - protein, 1108 aa, Unknown; identical to SEQ ID NO: 589
  source: /note="Description of Unknown: Cas12 sequence"

SEQ ID NO: 604 - protein, 1110 aa, Unknown
  source: /note="Description of Unknown: Cas12 sequence"
MVVRSIKLKMKTNSGTDSIYLRKALWRTHRLINEGIVYYMSLLTLYRQDTLGDRTKEEIQSELIKKIREQQRNNGLSEELGSDQEILSLLRHLYELIIPSINGESGDANQLGNKFLYPLVDPNSQSGKGTSNAGRKSKWKRMKEEGNPDWEVEFKKDEERKANDPTIKVFDHLKKYSLLPLFPLFTNNQKDIEWLPMGKRQSVRKWDKDMFIQAIERLLSWESWNRRLGAEREKLEEKIENFYKEHLSGGQIWIEKIREFERVRDRELGETSFSSNDGYLITSRQIRGWDRVYEKWSKISESASKEELWRVVAEQQSKMREGFGDPKVFSFLAELENMDIWRKHPERIYHIATYNGLLKKLSHTKAQATFTLPDAVKHPLWIRYEAQGGTNLNLFKLEETTKKNCKVILSKIIWPTEDGWFEKENVEVDLAPSKQFYRQIKLQDHIKGKQEISFSDYSSGISLKGVLGGSRIQFDRKYIENHQELLPSGDIGPVFFNLVIDLLPIQETRNGRLKSPIGKTLKVVSSEFPKVIDYKPKELTEWINVSSVTGKVGVESITEGMRVMSIDLGQRTSASVSIFEVVKELPKDKEKMLYYNIKDTELFALHKRSFLLNLPGEEVTKRNRQKRKDRRKKLLFIRSQIRMLASVLKLETKNTPDERKKAINKLVEIVDSYEWTESEKEIWNSEFEYLTNKAVFKQEIWRESLIKSHHRMEPHVGQLVSEWRKSLNEGRRNLAGITMWNIEELEDTRRLLISWSKRSRTPGEANRINNDEPFGAKLLEHIQNVKDDRLKQLANLIVMTALGYKYDKEEKSRDKRWKEKYPACQVILFENLNRYLFSLDRSKRENSKLMKWAHRSIPRTVWMQGEMFGLQVGDVRSEYSSRFHAKSGAPGIRCHSLNDEDLKEESFKLKHLIETGFISEEEISSLKKGDIVPWPGGELFVTLSKPYKKGKDIELTVIHADINAAQNLQKRFWQQNSEVYRIPCQLEKAGDDEFFIPKSQTEIVKKYFGKGRFVKINDKKEVYNWEESEKMKIKTESTITLQDLEGFEDIFQTLELAQEQQKKYSTLFRDPSGYFFNEKNWRPQKEFWSIVNNIIRSSLKKKILKNKVEV

SEQ ID NO: 605 - protein, 687 aa, Unknown
  source: /note="Description of Unknown: Cas12 sequence"
  MOD_RES (156)..(527): Any amino acid
MSNPNIPNISPNITLTRDDVVNLLMSSIAMEELGLAHIINAEGEKIQFALGTLQGASGPPATLQQVLEVNQSTQAMLDTIFRQEMMLDSKLKTATNIPTLRGPTGPVGPTGAPGGVISINGQTGVVTLDASNGVMPFMREQSTSSLDDYKDPGIYXXXXXXXXXXXXXXXXXXXXXXXXXXXXXXXXXXXXXXXXXXXXXXXXXXXXXXXXXXXXXXXXXXXXXXXXXXXXXXXXXXXXXXXXXXXXXXXXXXXXXXXXXXXXXXXXXXXXXXXXXXXXXXXXXXXXXXXXXXXXXXXXXXXXXXXXXXXXXXXXXXXXXXXXXXXXXXXXXXXXXXXXXXXXXXXXXXXXXXXXXXXXXXXXXXXXXXXXXXXXXXXXXXXXXXXXXXXXXXXXXXXXXXXXXXXXXXXXXXXXXXXXXXXXXXXXXXXXXXXXXXXXXXXXXXXXXXXXXXXXXXXXXXXXXXXXXXXXXXXXXXXXXXXXXXXXXXXXXXXXXXXXXXXXXXXXXXXXXXXXXXXXXXXXXXXXGATGATGATGATGPQEPRALREPRAPQARREPRGLLEPQVLRGPQEPRALREPRAPRALREPRALRALRALQELRAPRALRGLQEPRVLQGPRERQVRPEPRVLQGPRERQVRQGLQGLLEPRAKRERQVRPEPREPQERQAPLVQQALLEPQALLGQAL

SEQ ID NO: 606 - protein, 1380 aa, Unknown
  source: /note="Description of Unknown: Cas12 sequence"
MNRIYQGRVSKVEIPNPGDKGKPWQPLPNWQDILWQHHELFQDAVNYYLLALLSLARDSANPATPIRKRMDDPASEHQIWTSFRRRGQMRSGMRDSVAKYLCPVKTEPTLDECFAAVLEGNKENPDVLDLALQELLDECDGDGAIQQEGRSMLPRFCSPSYKGDFPQSAAAKDKKSAKEWLPTFLHSAENASNLKLVRQRLKFELFANRDLTGRILDAVESRKRLTEMLGWLTERNPSLAAERERLQKIIAALPDTFNLPAWRGGSVNKEALKQRFYAWLIFEHVESSRITFDILRDSFPTPKEKRKSVSETIQSEKPSLELSDDPIKLARGTRGYVFRAFTSLPCWGADNANLLAWKEFDVAAFKEALKALHQVESKSEERNKERERLLQRHSVMRGSIKWKPSPESEEKEPDVLAGDPRIERLEKLLKTELASEYEMSEGQTVEYGLQPRTIRGFRDLRKEWNKIVKPGEPFTEQKKGNLVTALRSYQIENPNVIGSVRLYEALLEKGNWLVWQEADSATVEKWAKQKFASDPLEALTEERQLLRDIERLKQPIRFTPADAVHSRRQFYLAEKGDLSVKNRFDPQNQTLQVPIAIKNDDHWKQQFVKIHFSAPRAVRDQLIDETMEESKEARWQQPMMEALGLSLKLTKNNAEVSLSECTAVSLMPEELASGDRRILLNFPITLETAPMVKALGKASLWDGQFAAYGDDNFYLRWPKDKWPAEKESNAWYRRLTEFSLLSVDLGQRDAGAFAVIGATTGKPTRPASRFIGEANGQSWHASVRATGVLRLPGEDAHVFRSGQWQEELYGERGRSADATEWTEAKRICETLGLKFDEILGGDPQWFSFPELNDRLLFAVRRAQTRLARLQSWSWMIADETRRENIREAILAADDDELSLKAAAEKSLWPVLAEKLASEVNRLRNLIPQQLVLLANRILPLRGRRWEWIKRDDTSGCHVLRETNPGTDTTSKKVCGQRGLSMKRLEQLDELRRRFQSLNRALMQTPGQTAGLGKSKRGIELPDPCPDLLDKTEQLREQRVNQTAHLILAQALGVRLRTPQKGDALREQNNVHGEYETFRLPVDFIVLEDLSRYLSSQGRGRNENSRLMKWCHRAILLKLKQLCESYGLKILETNAAYSSRFCSRTGVAGFRAVELTPDARKEFRWRKHLNRLEKAASGEIKLDREARAESEHVKRLFDMLDQLNAGRKEAGKPLRTLLAPIAGGQIFIPMQGHATQADINAAINLGLRAIAAPDCHAIHVRIRTERKDKTLRVRTGSNREKVRWEGKNPEIQMNKAADLASLTGDRQPNFFPDPSAIACYDRAKIEGVQLPFASGRGLWGTMNIELQWTRVNQLNNDRAEKKWNLTRSLPEQSSEEDYIPM

SEQ ID NO: 607 - protein, 1144 aa, Unknown
  source: /note="Description of Unknown: Cas12 sequence"
MAVKSIKVKLMLGHLPEIREGLWHLHEAVNLGVRYYTEWLALLRQGNLYRRGKDGAQECYMTAEQCRQELLVRLRDRQKRNGHTGDPGTDEELLGVARRLYELLVPQSVGKKGQAQMLASGFLSPLADPKSEGGKGTSKSGRKPAWMGMKEAGDSRWVEAKARYEANKAKDPTKQVIASLEMYGLRPLFDVFTETYKTIRWMPLGKHQGVRAWDRDMFQQSLERLMSWESWNERVGAEFARLVDRRDRFREKHFTGQEHLVALAQRLEQEMKEASPGFESKSSQAHRITKRALRGADGIIDDWLKLSEGEPVDRFDEILRKRQAQNPRRFGSHDLFLKLAEPVFQPLWREDPSFLSRWASYNEVLNKLEDAKQFATFTLPSPCSNPVWARFENAEGTNIFKYDFLFDHFGKGRHGVRFQRMIVMRDGVPTEVEGIVVPIAPSRQLDALAPNDAASPIDVFVGDPAAPGAFRGQFGGAKIQYRRSALVRKGRREEKAYLCGFRLPSQRRTGTPADDAGEVFLNLSLRVESQSEQAGRRNPPYAAVFHISDQTRRVIVRYGEIERYLAEHPDTGIPGSRGLTSGLRVMSVDLGLRTSAAISVFRVAHRDELTPDAHGRQPFFFPIHGMDHLVALHERSHLIRLPGETESKKVRSIREQRLDRLNRLRSQMASLRLLVRTGVLDEQKRDRNWERLQSSMERGGERMPSDWWDLFQAQVRYLAQHRDASGEAWGRMVQAAVRTLWRQLAKQVRDWRKEVRRNADKVKIRGIARDVPGGHSLAQLDYLERQYRFLRSWSAFSVQAGQVVRAERDSRFAVALREHIDNGKKDRLKKLADRILMEALGYVYVTDGRRAGQWQAVYPPCQLVLLEELSEYRFSNDRPPSENSQLMVWSHRGVLEELIHQAQVHDVLVGTIPAAFSSRFDARTGAPGIRCRRVPSIPLKDAPSIPIWLSHYLKQTERDAAALRPGELIPTGDGEFLVTPAGRGASGVRVVHADINAAHNLQRRLWENFDLSDIRVRCDRREGKDGTVVLIPRLTNQRVKERYSGVIFTSEDGVSFTVGDAKTRRRSSASQGEGDDLSDEEQELLAEADDARERSVVLFRDPSGFVNGGRWTAQRAFWGMVHNRIETLLAERFSVSGAAEKVRG

SEQ ID NO: 608 - protein, 647 aa, Unknown
  source: /note="Description of Unknown: Cas12 sequence"
  MOD_RES (35)..(498): Any amino acid
MGLVDTAGGFLIPAALDPAILLSGDGSTNPIRQVXXXXXXXXXXXXXXXXXXXXXXXXXXXXXXXXXXXXXXXXXXXXXXXXXXXXXXXXXXXXXXXXXXXXXXXXXXXXXXXXXXXXXXXXXXXXXXXXXXXXXXXXXXXXXXXXXXXXXXXXXXXXXXXXXXXXXXXXXXXXXXXXXXXXXXXXXXXXXXXXXXXXXXXXXXXXXXXXXXXXXXXXXXXXXXXXXXXXXXXXXXXXXXXXXXXXXXXXXXXXXXXXXXXXXXXXXXXXXXXXXXXXXXXXXXXXXXXXXXXXXXXXXXXXXXXXXXXXXXXXXXXXXXXXXXXXXXXXXXXXXXXXXXXXXXXXXXXXXXXXXXXXXXXXXXXXXXXXXXXXXXXXXXXXXXXXXXXXXXXXXXXXXXXXXXXXXXXXXXXXXXXXXXXXXXXXXXXXXXXXXXXXXXXXXXXXXXXXXXXXXXXXXXXXXXXXXXXXXXXXXXXXXXXXXXXXXXXXXXXXXXXXPSRCRCLAFGRSSSAIRRPAASSSEGVKSLRSVFSERSALARSTTSAIVWHTCTGMRSHPSSRAASSRRWPNTSRLSGVTPIGCSKRQGDSPCGCCCGAHLVVAQRCVAFCCHDRGVTEKLLYSSQVVGAAVGAGGVSVPQGVHGRVTG

SEQ ID NO: 609 - protein, 1262 aa, Unknown; identical to SEQ ID NO: 45
  source: /note="Description of Unknown: Cas12 sequence"

SEQ ID NO: 610 - protein, 978 aa, Unknown
  source: /note="Description of Unknown: Cas12 sequence"
MQEIKRINKIRRRLVKDSNTKKAGKTGPMKTLLVRVMTPDLRERLENLRKKPENIPQPISNTSRANLNKLLTDYTEMKKAILHVYWEEFQKDPVGLMSRVAQPAPKNIDQRKLIPVKDGNERLTSSGFACSQCCQPLYVYKLEQVNDKGKPHTNYFGRCNVSEHERLILLSPHKPEANDELVTYSLGKFGQRALDFYSIHVTRESNHPVKPLEQIGGNSCASGPVGKALSDACMGAVASFLTKYQDIILEHQKVIKKNEKRLANLKDIASANGLAFPKITLPPQPHTKEGIEAYNNVVAQIVIWVNLNLWQKLKIGRDEAKPLQRLKGFPSFPLVERQANEVDWWDMVCNVKKLINEKKEDGKVFWQNLAGYKRQEALLPYLSSEEDRKKGKKFARYQFGDLLLHLEKKHGEDWGKVYDEAWERIDKKVEGLSKHIKLEEERRSEDAQSKAALTDWLRAKASFVIEGLKEADKDEFCRCELKLQKWYGDLRGKPFAIEAENSILDISGFSKQYNCAFIWQKDGVKKLNLYLIINYFKGGKLRFKKIKPEAFEANRFYTVINKKSGEIVPMEVNFNFDDPNLIILPLAFGKRQGREFIWNDLLSLETGSLKLANGRVIEKTLYNRRTRQDEPALFVALTFERREVLDSSNIKPMNLIGIDRGENIPAVIALTDPEGCPLSRFKDSLGNPTHILRIGESYKEKQRTIQAAKEVEQRRAGGYSRKYASKAKNLADDMVRNTARDLLYYAVTQDAMLIFENLSRGFGRQGKRTFMAERQYTRMEDWLTAKLAYEGLPSKTYLSKTLAQYTSKTCSNCGFTITSADYDRVLEKLKKTATGWMTTINGKELKVEGQITYYNRYKRQNVVKDLSVELDRLSEESVNNDISSWTKGRSGEALSLLKKRFSHRPVQEKFVCLNCGFETHADEQAALNIARSWLFLRSQEYKKYQTNKTTGNTDKRAFVETWQSFYRKKLKEVWKPAV

SEQ ID NO: 611 - protein, 1488 aa, Unknown
  source: /note="Description of Unknown: Cas12 sequence"
MGKQSTNSSGLKATSGAPSIEKPVTTQRAYTLRLRGIEGDKTWRDSLWATHEAINLGAKAFGDWLLTLRGGLEHTLADATVAGGKGKPARPPSADERRDRRVLLALSWLTVEDERGAPKAPGLIVAYGDDCKSAKDSQDGRDRKVEDALRDILIKRSVAPGAVESWVNDCVVSLKARIRDDAVWVNRSAAFDALRASWRGLTCPNARTVLEQFFGPVADWITLPARAADDGEGDTGGPTAAGSSNDTEFKLVARSFLSENFGTGLKSSKSDISDALMQATRSLAALRGGSPGSAVWSHLCTEFGLLAADDEARAKALRVRIGWTSGRRSKGRLALATAASKASLAQVDIELLIKKLSEEAQEKLAGSTKLPLPWVNDLMAALERSIGFGFVTERNLIDEFGVMLDHAARRVSIACSWIKLAELERRQFEEDAKKLDQVRTQHADAAAFLDTLGCRRGSESGSAGGASVVIRKRAVLGWNEVVGDWARQGCKSVQERIDAARLLQGELEKFGDIRLFEELAANDAQVVWQNAEGETDPTILARYSAGSVAKANQQRFKVPAYRHPDPLRHPVFGDFGKSRWKIDFAVHESDRAQSGGKRVRSLDAAWQSDVRNMRMALWTGKRVEMVPLRWSSKRLSKDLGISDLSLKDPTVVTRGDRLGRAAVGPGDPVRVASVFAEDNWNGRLQAPRVELNRVARLTQSGNLVQARRLRDRLSWLVSFSPKLAPSGPFIDYAAAHGIEPHKKSGEYWPNSAMNKERKGHHSKLIYSRLPSLRVLSVDLGHRFAAACAVWESMSAAQMRLAASKGKVVRGGIAEGALFIHIESTVADGTVRTTVYRRIGEDALPDGSPHPAPWAKLERQFLIKLQGEETPSRMAALDELVMIADWERALGYQPVTASSTKQSNGVAGLMGRTVRLFMHASRRHFDRARIAHNLTAEHRTKPGGVPESLTEETRIELLIDTLALWHGLFAGDRWRDPRAQKEWETSGLPSLKLPGRGDDDETAFGGPGRKAAMVVYRNELKPHAERMAHSDLSNLSKCWTDRWAQDDREWTAKSGRLRSLRRWITPRGLRPVSGDSAQLIERKAAAALRARHVGGLSMQRINTLTDLYRLLKSFKNRPEPSNLRKNIPEKGDARLIGFNQRLLDVRDRLREQRVKQLASRIVEAALGIGRIKIRRVAAGSPRPTLRVDAACHAVVTENLSNYQPAELQTRRENRQLMAWASSKVHKYLAESCQLHGLHLREVQPNYTSRQCSRTGAAGLRGVAVSATDLLTNPWWMRDVAQAKARIEKALKNGRNGAVADQLLVSAEAWALRIPERDRHDRKADESVKAFHAERVILPRKGGDLFVAESARCNGKGHVPALQADLNAAANVGIRALLDPDWPGKWWWVPCVGGTYSPSPEKTSGAKVLEHIDQLPHEMVDPPQVAPKSSAPQPKSSRAAKVKAKEFRAIENRWRTCSSELLSQGKWIPSGEYWSKVEAAVCLVLNDQIT

SEQ ID NO: 612 - protein, 1400 aa, Unknown
  source: /note="Description of Unknown: Cas12 sequence"
MAAFQRSYTMNLKPATSEQDKFILWNRLFLTHWSVNEGAKIFGELFLNLRGGLSPELDIFDLDKVKDDKKKKAFVMGRRRLLALGWLSVEDNLSAGEHPFRIREIPVGRNMGKSQASTLLTEILKNKGIKDEAVIKEWIDDCTPSLIANIREDAVWINRASSFNSITPCPTKDEVWIVLSGLLGLRFLDLSLEEVKGKETEYLYDLGEKETQSKSDPSKKARELFGNLFTQNPVLMKNSRDKKDTFAKEFYLAFKEFKDYEKLKEKIESWRKEKEFPLIENPVAEKYPPEVTFTGSPCTVSKRYRKLLVSLELWPSSQDENGNIPKTEKTEDKTHNQVLLDYLLKACNEGNKGTQKIITPVWANNLKAELELKMNEIIRIGESSSTELQRLMIKMAARRISQTLSWIKINEQTKHDAYQKKNKAFKLLSEIDKNGEACKWLENYELFRTDDSGGEEYHISLRAISCWKQILEEWQKNDSPKALREKVKEVQAEEEKFGDARLFEDLADDNARSVWLLPDGNKTPDILNWWCEYRTAEIDESRFKIPCYCHPHPFKHPVYVEYGKSNPKVIFAMKNNKVKKGHIEHGWNPQNPRSIALSLFNNGNRESSLVPFIWESKRLWKDLGGEATQIGDIPRSDRMGLSGKRESVKPKAPFQKEVWNARLQSDRRTLEKLEKYWNPESMKWIDDGKFLIQSKWFITFGPDMETAEGPWKLYLKEKYVDNKILGNRSKENQKRGYRAKKLLSGYPAGMRILSVDLGHRYAASCAVWETITKKQITEELAYQPDNNSLFEHSCKTIDKKIKNTVYRRIGEDSIDAPWAKLEKQFTIKLQGEDKSCYLLRSDEKELFRSILSKLSCLNNDTGHNILEMIENLLRIVKAKIYRQGILARISYSMTAQYKPGKGGQKSPLSDEDKIHYLSENLAAWSAIMGNQEWNEDVISDWYKTYISHLVSGPKPKEGNRKSDRDKIIEYFLPAARKLYDDNETRIKIHDLFKELWDENNKQLSAVLKEIKKIILPKGIRYFDKNTDNPSKWKNNQSKLKQITHRGGLSMQRIVAIEEYYKLAKAYKNHPEPDDLTKNIPLPGDNSSAGFNQRIRDTLERMKEQRVKQIASRIVESALGLGIEGYKKRPLTPENKPCQAIVIEDLSHYRPDELQTRRENRRLMQWSSSKVKKYLKEACEMHDVRLVEISPEYTSRQDSRTGAAGLRCIDINIREFLKDSSRWQNKINTIQKKPANKKSNLDQYLIELNESLGNKYKDKVIPSDNFVRIPRKGGDVFVSSSKESPVSKGIQADLNAAANIGLKALLDPDWAGAWWYILIEVKSNHVIPYGEKYKGSECLRAWKFSGLENQVMKNNMNLWRDLQSQFSGEDKWMSYKEYNELTEKRVINILRERAGLELIKE

SEQ ID NO: 613 - protein, 1263 aa, Unknown; identical to SEQ ID NO: 530
  source: /note="Description of Unknown: Cas12 sequence"

SEQ ID NO: 614 - protein, 1193 aa, Unknown; identical to SEQ ID NO: 601
  source: /note="Description of Unknown: Cas12 sequence"

SEQ ID NO: 615 - protein, 1108 aa, Unknown; identical to SEQ ID NO: 589
  source: /note="Description of Unknown: Cas12 sequence"

SEQ ID NO: 616 - protein, 1283 aa, Unknown; identical to SEQ ID NO: 46
  source: /note="Description of Unknown: Cas12 sequence"

SEQ ID NO: 617 - protein, 1413 aa, Unknown
  source: /note="Description of Unknown: Cas12 sequence"
MNRIYQGRVTKVEKLKNGKSPDDREELKDWQTALWRHHELFQDAVSYYTLALAAMAEGLPDKHPINVLRKRMEEAWEEFPRKTVTPAKNLRDSVRPWLGLSESASFGDALKKILPPAPENKEVRALAVALLAEKARTLKPQKTSASYWGRFCDDLKKKPNWDYSEEELARKTGSGDWVAGLWSEDALNKIDELAKSLKLSSLVKCVPDGQINPEGARNLVKEALDHLEGVSNGTKKEKNDPGPAKKTNNWLRQHASDVRNFIHKNKNQFSSLPNGRLITERARGGGININKTYAGVLFKAFPCPFTFDYVRAAVPEPKVKKVDQEKKSEQSATWTELEKRILRIGDDPIELARKNNKPIFKAFTALEKWSDQNSKSCWSDFDKCAFEEALKTLNQFNQKTEEREKRRSEAEAELKYMMDENPEWKPKKETEGDDVREVPILKGDPRYEKLVKLFGDLDEEGSEHATGKIYGPSRASLRGFGKLRNEWVDLFTKANDNPREQDLQKAVTGFQREHKLDMGYTAFFLKLCERDYWDIWRDDTEVEVKKIREKRWVKSVVYAAADTRELAEELERLQEPVRYTPAEPQFSRRLFMFSDIKGKQGAKHIREGLVEVSLAVKDQSGKYGTCRVRLHYSAPRLIRDHLSDGSSSMWLQPMMAALGLSSDARGCFTRDSKGNVKEPAVALMSDFVGRKRELRMLLNFPVDLDISKLEENIGKKARWEKQMNTAYEKNKLKQRFHLIWPGMELKETQEPGQFWWDNPTIQKEGMYCLAIDLSQRRAADYALLHAGVNRDSKTFVELGQAGGQSWFTKLCAAGSLRLPGEDTEVIREGKRQIELSGKKGRNATQSEYDQAIALAKQLLHNENSAELESAARDWLGDNAKRFSFPEQNDKLIDLYYGALSRYKTWLRWSWRLTEQHKELWDKTLDEIRKVPYFASWGELAGNGTNEATVQQLQKLIADAAVDLRNFLEKALLHIAYRALPLRENTWRWIENGKDGKGKPLHLLVSDGQSPAEIPWLRGQRGLSIARIEQLENFRRAVLSLNRLLRHEIGTKPEFGSSTCGESLPDPCPDLTDKIVRLKEERVNQTAHLIIAQSLGVRLKGHSLFTEEREKADMHGEHEVIPGRSPVDFVVLEDLSRYTTDKSRSRSENSRLMKWCHRKINEKVKLLAEPFGIPVIEVFASYSSKFDARTGAPGFRAVEVTSEDRPFWRKTIEKQSVAREVFDCLDNLVGKGLNGIHLVLPQNGGPLFIAAVKEDQPLPAIRQADINAAVNIGLRAIAGPSCYHAHPKVRLIKGESGTDKGKWLPRKGKEANKRENAQFGNVDLDLEVKFNRLDIDSDVLKGDNTNLFHDPLNIACYGFATIQNLQHPFLAHASAVFSRQKGAVARLQWEVCRAINSRRLEAWQKKAEKAAVKR

SEQ ID NO: 618 - protein, 1408 aa, Unknown
  source: /note="Description of Unknown: Cas12 sequence"
MSHELAEQPSPPKNKEPTCEESDAIRKNRRILLALSWLSVEDDCSAPTGTFRVASGKDSEAERKNKVLTAFRSILTARRMRSQDVESWIADCAASLSAKIREDAVWINRSACFDQRALDLKVLSREYAKAAVMSFFGPLDEYFKLPDEADDTKPAVGGDGPDFRTLARQWVSTNFGTGKKSDSEAIAQNLRKLADANLAPFSGKPKAALIAHLSVELDGSTADIDGLCRAIGWNTGRPSKGRVAIERLPDPPTETSIQTMQQKFREEAEAKASSKGLRQVPEWMPAFQKSIERDCGMPFKLGEGRDHIGEFSVMLDHAARRVSIGHSWIKRAEAERRRFEADAQRLNHIPAAAKDWLDQFVQFRSGSSGAAAAGGEYRIRRRAIEGWDEIIKRWKRAACKSPEDRVAAAREVQADPEIEKFGDIQLFEALAADDAECVWRGDGNGTPDPLKDYVAATDALDKMRRFKVPAYRHPDPLAHPVFGDFGNSRGDIRFAVHEAAKATRGTKRIAKDQKEWIRERHGLRMGLWDGQSVRTADLRWSSKRLVDDLALRNHVTTRRTGPVSRADRLGRAAAGLGADEAACVAGLFELPDWNGRLQAPRAQLDAIAACVAANGGKWDDKARKLRDRIEWLVSFSAKLECCGPFMEYASQNGIQPNGKGEYYPHAERNKGRTGHAKLILSRLPGLRVLAVDLGHRFAAACAVWEALSKIAFDAETKGREVVSGGRAADDLYCHTRHLDCAGKARTTIYRRIGPDKLPDGSDHPAPWARLDRQFLIKLQGEERPARAAGPAETAAVQQIETDLGRARGQEDLPPRPVDSLMREAVRTIRIALRRHGDAARIAYAFKPGAKRLKPGGGAQDHTPETHADAILEALLRWHELATGARWRDPWAETQWKDWVQPHISATLPELANDADRWERKRHRAALEQVLRPVAQMLIQRPTDALHQVWSKHWADEDLKWPSRLRWLRNWLLPRGPRARSGAARNVGGLSLLRIATLRELYQTQKAYAMRPEPDDPRKRIAGRNDDRYDELGRSVLQVIERLREQRVKQLASRIVEAALGVGRAKPTRGRQRPQSRVDVPCHAVIIESLRNYRPDELQTRRENRAIMNWSAGKVRKYLEEACQLHGLHLREVMPNYTSREDSRTGLPGVRCVDVPVDPKLGKPKAYWWNSVLSTARKKSIGDAASHDKQGDATSRFIVELAGCLDRLKADGKPLPKTVRVPRIGGDLFVAAPPTSCTAPAHQPHPACDGARALQADLNAAANIGLRALLDPDFPAKWWYVPCIDDQRGLALPRADKVLGSACFPGDPATFGSLLKTRTAAGPAVDGQAAPDRKPRTGTHRPGSAKSRSLGDGKATTNYWSDRSARDLRPADEGGHWQPTNVYWNWVRKRALLGLYSFNGLSPPSDDRP

SEQ ID NO: 619 - protein, 1108 aa, Unknown
  source: /note="Description of Unknown: Cas12 sequence"
MAIRSIKLKLKTNTGPEAQNLRKGIWRTHRLLNEGVAYYMNMLLLFRQESTDKKTKQEIHEELIRHIRAQQQRNHADEKTQALPLEKALEALRKLYELLVPSSVGQSGDSQIISRKFLSPLVDPNSEGGKGTSKAGAKPAWQKKKEANDPTWKQDYEKWKKRREEDPTASVITTLEEYGIRPLFPLYTNTVAEIAWLPLKSGQFVRTWDRDMFQQAIEGMLSWESWNRRVQEEYAKLEGKMAQLNEQLEGGEEWIRLLEQYEEKREQELRENMTAANDKFRITKRQMKGWKELYEVWSTFLPSASQEQYKEAIKRVQQRLRGKFGDFHFFQYLSEEENRLIWKGNPQRIHYFVARNELTKKLEKAKQSARRTLPDANKHPLWVRYDARGGNLQDYYLTAESDKPRSRRFVTFSQLIWPSESGWLEKKDVQAELALSRQFYQQVTFLKNDKGKQEIEFKDKGSGTTFSGHLGGAKLQLERSVLENKERKFEEGEIGKAYLNVAIDFKPLQEVKNGRVQAPYGQVLQLIRLPNAFPKVRTYKSEELVEWIKASPQHLSGVESLASGFRVMSIDLGLRAAAATSIFSVEESSDKNATKLAYWIEGTPLVAVHQRSYMLRLPGEQVEQHVWEKRDERGDQHKRVRFQIRRLAEIIRLANKQYGDRWDELNRLDEAVSKEKSPLDQADRTFWEGIVSDLTTALPLNDADWTEAVVQIHRKAELYVGKVVQAWRKRFNADERKGIAGLSMWSIEELDGLRKLLISWSRRTRNPQEVNRFEPEHTGHKRLLTHIQNVKKDRLKQVSHAIVMTALGYIYDEKKQKWCAKYPACQVILFENLSQYRSNLDRSAKENSTLMKWAHRSIPKYVHMQAEPYGIQIGDVRAEYSSRYYAKTGTPGIRCKKLREHDVKGWRLDHLKKRLVNEQFLTEAQVEQLKAGDIIPDDSGELFMTMTDGSGGKEIVFLQADINAAQNLQKRFWQRNSELFKVSCRVIVRDEAEYLVPQAKKVQEKLGKGVFVKKSDTAWKEVYVWDSQAKLKGKTTFTEESESPEQLEDLQEMIEEAEEAKGTYRTLFRDPSGVFFPDFVWNTPKDFWGEVKRKLYGKLRERLLTKVR

SEQ ID NO: 620 - protein, 1364 aa, Unknown
  source: /note="Description of Unknown: Cas12 sequence"
MNRIYQGRVTKVEVPDGKDEKGNIKWKKLENWSDILWQHHMLFQDAVNYYTLALAAISGSAVGSDEKSIILREWAVQVQNIWEKAKKKATVFEGPQKRLTSILGLEQNASFDIAAKHILRTSEAKPEQRASALIRLLEEIDKKNHNVVCGERLPFFCPRNIQSKRSPTSKAVSSVQEQKRQEEVRRFHNMQPEEVVKNAVTLDISLFKSSPKIVFLEDPKKARAELLKQFDNACKKHKELVGIKKAFTESIDKHGSSLKVPAPGSKPSGLYPSAIVFKYFPVDITKTVFLKATEKLAMGKDREVTNDPIADARVNDKPHFDYFTNIALIREKEKNRAAWFEFDLAAFIEAIMSPHRFYQDTQKRKEAARKLEEKIKAIEGKGGQFKESDSEDDDVDSLPGFEGDTRIDLLRKLVTDTLGWLGESETPDNNEGKKTEYSISERTLRIFPDIQKQWSELAEKGETTEGKLLEVLKHEQTEHQSDFGSATLYQHLAKPEFHPIWLKSGTEEWHAENPLKAWLNYKELQYELTDKKRPIHFTPAHPVYSPRYFDFPKKSETEEKEVSKNTHSLTTSLASEHIKNSLQFTAGLIRKTNVGKKAIKARFSYSAPRLRRDCLRSENNENLYKAPWLQPMMRALGIDEEKADRQNFANTRITLMAKGLDDIQLGFPVEANSQELQKEVSNGISWKGQFNWGGIASLSALRWPHEKKPKNPPEQPWWGIDSFSCLAVDLGQRYAGAFARLDVSTIEKKGKSRFIGEACDKKWYAKVSRMGLLRLPGEDVKVWRDASKIDKENGFAFRKELFGEKGRSATPLEAEETAELIKLFGANEKDVMPDNWSKELSFPEQNDKLLIVARRAQAAVSRLHRWAWFFDEAKRSDDAIREILESDDTDLKQKVNKNEIEKVKETIISLLKVKQELLPTLLTRLANRVLPLRGRSWEWKKHHQKNDGFILDQTGKAMPNVLIRGQRGLSMDRIEQITELRKRFQALNQSLRRQIGKKAPAKRDDSIPDCCPDLLEKLDHMKEQRVNQTAHMILAEALGLKLAEPPKDKKELNETCDMHGAYAKVDNPVSFIVIEDLSRYRSSQGRSPRENSRLMKWCHRAVRDKLKEMCEVFFPLCERRKAGSAWVSLPPLLETPAAYSSRFCSRSGVAGFRAVEVIPGFELKYPWSWLKDKKDKAGNLAKEALNIRTVSEQLKAFNQDKPEKPRTLLVPIAGGPIFVPISEVGLSSFGLKPQVVQADINAAINLGLRAISDPRIWEIHPRLRTEKRDGRLFAREKRKYGEEKVEVQPSKNEKAKKVKDDRKPNYFADFSGKVDWGFGNIKNESGLTLVSGKALWWTINQLQWERCFDINKRHIEDWSNKQKQ

SEQ ID NO: 621 - protein, 1313 aa, Unknown
  source: /note="Description of Unknown: Cas12 sequence"
MGEENNFSQFTGLYELSKTLRFELKPVWETEKLLIENQVFPKDKIVYESYKKIRPYLDKLHLQFIEESLSSVKLDFNEIEKKFLEWDKEKDKTTKNKLKEEIFWKNKKWWLNSNLRKDMVSYFNLNWKKWINNFENKTIVNEKWKEEKIKIKWEWYKILLSDSNLNILSDFFTQEKEWDNVLIEKYIENPNFKENDWEKKFILEKQNLFKSFKWFTTYFTNFNHSRENFYKDDWKSWRIATRIIDENLIFFLKNKKAFDEKYKNNSEITVKFNEKLLNFWEKLEDFFSLDFYNRCYTWKQIEYYNQLIWELNSVVNHEKQAKFSEYTQNKKVSENNKFNKYDFPIFKELYKQILSEKATEQKFIEINDFKELKQNLQELIEKNKQKNKFAINLTKSLIEKIDEYDFEKIYISKLSLNTISSKFFWSNKWFFIQENLEKNIWKKNKNWKIDLPDFIKLSDIKTALENFNKILFEDKENKENIFKEEFDNITENNIFIKFMKIYENEFINLIEWKKNNKWDYEIIWYNKSLLDLEKNILNISDFSDKKEEKEKQIEYIKKYLDSSLNIYRVMKYFALEKGKESVEWEFETDDIFYNEFKKFYIDNEIISYYNEFRNYLTKKPYSSNKLKLNFENWTLIDGWDKNKEPDNYWTILRKNWKYFLALQIKWKNNIFYKKKWSWVIDIEEAYKIDLWDEFYEKMDYKFLPDPKKMLPKVIFAKSNVKLFNPSKEILQIKENETFKTWDKFKVNDFYKIVDFYKENIIKYPDWKIFNFKFSDTKTYNNLSDFYKEIELWSYDLNFRKVSKKYILKSIEEKNIYLFEIYNKDFADWKTWSENLHTMYFKWLFEENNLNNIVLKLNWQAEIFRREASLKEKEVNRAKENKEKSHNIIENARYTKDKLFFHCPIKLNFAKHNEKINQEILKYISDNKEINIIWIDRWEKHLAYYSVINRDWNIIKDKNWNLVKWSLNIVWNNQNYHDKLETREKERQDARWSWKTIWNIKDLKQGYISQVVHKLAELVIEHNAIIVFEDLNSWFKRWRQKIERQVYQKLEKALIEKLNYLTFKDKNFWENWHYLKAYQLTAPFETFEKVWKQTWVIFYTDPSYTSSTCPACWFRKDLYLKYSNLKNALWDIEKIDSIIFDWKRFIFEYNNKKVFTDRDRKRNISSEESWIKWWKTIDNNITEFLEILFKKSNIDYTSWNNLILDIQEINEKELYKWVFDNFNAILNIRNSTIKDNSRTWDFICCPACDFDSRKENKIWIENWDDNWAFNIARKWIIILNKIDSYLNEKWSLDKILWWDMIVKQIDWDDFTHKK

SEQ ID NO: 622 - protein, 767 aa, Unknown; identical to SEQ ID NO: 570
  source: /note="Description of Unknown: Cas12 sequence"

SEQ ID NO: 623 - protein, 1313 aa, Unknown; identical to SEQ ID NO: 621
  source: /note="Description of Unknown: Cas12 sequence"

SEQ ID NO: 624 - protein, 1500 aa, Unknown
  source: /note="Description of Unknown: Cas12 sequence"
MATAINYPTTQRAYTLRLRGIDPQDQSWRDALWATHEAVNRGAKVFGEWLLTLRGGLDHQLADAPVKVRGGTTRLPSDEERRDRRVLLALSWLSVEDAHGAPPDASLIVAKGTDSADCRARKLADALIAILQARSVAASEIGDPSKPPEDQPGTWLGDCMGSLSAAIRDDAVWVNRSKAFDAATQSCPSLTRDEIWDFLEPFFASPDAYLKPERAESDEGDSTSAATEDKAKDLVQKAGGWLSKRMGAGGGANFQDLARAYQAIAQWASSAQPGQSAQQAVGSLAGYLSQHGFSPTANDATGVLAVISGPGYKSATRNHITAIATSPEITPQDLSKLQELATKDKAGCSSKIGGKGPRPYATMILQQVEAACGFTYLQSDGPARHREFSVMLDHAARRVNVAHSWIKNAEAERRQFESDARRIKKVPQDALNWLRGYCEERGGASGSLEGYRIRRRAIDGWDQVVIRWSRSDCQSADDRIAAARQLQDDPEIDKFGDIQLFEALAAEEALCVWKPDGNPTAQPLKDFVAATEADAKKKRFKVPAYRHPDPLRHPVFTDFGNSRWGIEYSAHRAPAKCDELGQQVDRLTQAVAEAQRNLDGATAAQRASRESKLAEAQSKLVAAQTEFAAINDPHRVELKLWNGQAVAAIPMRWSSKRLIADLSLRRATQPSSDQRIGVTRADRLGRAAGNADDGRPVTITGLFQQDHWNGRLQAPRAQLDAIAKHVDKHGWDAKARRQIARIRWVVSFSAELSQQGPWFEFCHRFGEDAPARPFVSRHGEYAVKHRDNDQRKGHAKLILSRLPGLRVLAVDLGHRYAAACAVWEAISSDQMRQACAAANAPAPHPLAMYIHLKSTTAKGKPTTTIYRRIGPDKLPDGTPHPAPWARLDRQFLIKLPGEDRPARAASPDEIKAVEDFEDSVGRVRTAVDPPRKRGVDLLMHDAVRTARLALARHGRRARIAFQLISQVRILPGGRPQTLDDAGRRDLLNDTLADWYALATDSRWTDAAARQLWNERLAALNGGFTIDPPADASQPEAERTRAQRRQAEQELRHRLASLVEALFCNPTLCQQLHQAWTDRWNADDQQWRSRLKWLSRWLLPRGGSRRDGSRRHVGGLSLTRISTLIDFRRKVQVGYFTRLRPDGSRAEIGPQFGQSTLDAIQRLKDQRIKQLTSRIVEAALGIGVEQDRIWDAAKRKWRTVKRPREPRYHVDDQGVQQRDPRFQACHAVVIEDLSHYRPEETRTRRENRATMDWKSAETRKRLADHCQLYGLHLRDVNPQYTSRQDSRTGAPGCRCVDVSVADFLTKPAWRKQVAQARGKVASNRGDARDRLLVELDHQLTTANSLRGEMDSLRIPVNGGEVFVSADPRSPLAAGIQADLNAAANIGLRALMDPDFLGTWWYVPCDPSTKKPHIEKVKGSILATVGALQATSEEAAAPPRRGRGGTRSAAPREVINLWRDPSAVRIQDATAGEVWDVTPVYWSIVKDRVVDVLRQRNTKSGD

SEQ ID NO: 625 - protein, 1202 aa, Unknown; identical to SEQ ID NO: 561
  source: /note="Description of Unknown: Cas12 sequence"

SEQ ID NO: 626 - protein, 1397 aa, Unknown
  source: /note="Description of Unknown: Cas12 sequence"
MAAFQRSYTMNLKPATSEQDKFILWNRLFLTHWSVNEGAKIFGELFLNLRGGLSPELGIFDLNKDKDDRKKKALVMGRRRLLALGWLSVEDNLSAGDHPFRIREIPVGRNMEIKQATTLLTEILKNKGVKDEAVIKEWIDDCTPSLIANIREDAVWINRAKSFYSMNPCPTKDEVWKILSYVLNTSFLDLSLNDSSERDNTKNKKGTKENEKDVSNKSKELYGWLFTKNPNKMREAGENKDKFINNFRENFNTFTDYANLKVEIELWRKNNISNTLLITQKAKYPPEVKEANHPSKFSVGYRKLLVHLELWPSSKDENGDIPKGIEGKDKSHNQILLDYLLEVCNEGNKTTKKVIVPAWADGIKTELESKASIKVGDSTSSVLQRLMIKMAARRISQTLSWIKINEQVRHDAYQKKNKAFKLLCEIDKNGEACKWLENYELFRRDDSGGEEYHISARAISCWKQILEEWQKNDSSKALREKVKVVQAAEDKFGDARLFEDLADDNARSVWLLPDGNKTPDILNWWCEYRTADIDESRFKIPCYCHPHPFKHPVYVEYGKSNPQVIFSLKHDKARKNRIDNGWNPKNPRILALLLLDIVRQKSTLAPFVWESKRLWKDLGGDATVTYKIPRSDRMGLSSIGNIDYARPEVPFLKEKWNARLQSDRRTLEKLEKYWNPESMKWIDDGKFLIQSKWFITFGPDMETAEGPWKLYLKENINDNNYLGNRSKENQKRGYRAKKLLSGYPAGMRILSVDLGHRYAASCAIWETITKKQITEELAYQPDKNSVFEHSCKTIDKKIKNTVYRRIGDDSIDAPWAKLEKQFTIKLQGEDKSCYLLRSDEKELFRSILSKLSCLNNDTGHNILEMIENLLRIVKAKIYRQGILARISYSMTAQYKPGKGGQKSPLSDEDKIHYLSENLAAWSALMGNQEWNEDGISDWYKKYISHLVSGPKPKEGNRKSDRDKIIEYFLPAARKLYDDNETRINIHDLFKELWDENNKQLSAVLKEIKKIILPKGIRYFDKNNDSSSRWKNNQSKLKQITHRGGLSLRRIVAIEGYYKLAKAYKNHPEPDNLTKNIPLPGDNSSAGFNQRIRDTLERMKEQRVKQIASRIVESALGLGIEGYKKRPLTPESKPCQAIVIEDLSHYRPDELQTRRENRRLMQWSSSKVKKYLSEACEMHDVLLVEISPEYTSRQDSRTGVAGLRCIDINIREFLKDSSSWQNKIKTIQMKPTNKKSNLDQYLIELNESLGERYKDKVIPSDKFVRIPRKGGDIFVSSSKESPVSKGIQADLNAAANIGLKALLDPDWAGAWWYILIEAKSNHVIPYGKKYKGAECLRDFKFSGLENQVMKNNMNLWRDLQSQFSSEDKWMSYKEYNELTEKRVINILRERAGLELIEE

SEQ ID NO: 627 - protein, 1203 aa, Unknown
  source: /note="Description of Unknown: Cas12 sequence"
MPTRTINLKMVLGRKDDTAELRRALWTTHEHVNLAVAEVERVLLRCRGRSYWTLDRRGDPVHVPESQVAEDALAMAREAQRRNGWPVVGEDEEILLALRYLYEQIVPSCLLDDLGKPLKGDAQKIGTNYAGPLFDSDTCRRDEGKDVACCGPFHEVAGKYLGALPEWATPISKQEFDGKDASHLRFKATGGDDAFFRVSIEKANAWYEDPANQDALKNKAYNKDDWKKEKDKGISSWAVKYIQKQLQLGQDPRTEVRRKLWLELGLLPLFIPVFDKTMVGNLWNRLAVRLALAHLLSWESWNHRAVQDQALARAKRDELAALFLGMEDGFAGLREYELRRNESIKQHAFEPVDRPYVVSGRALRSWTRVREEWLRHGDTQESRKNICNRLQDRLRGKFGDPDVFHWLAEDGQEALWKERDCVTSFSLLNDADGLLEKRKGYALMTFADARLHPRWAMYEAPGGSNLRTYQIRKTENGLWADVVLLSPRNESAAVEEKTFNVRLAPSGQLSNVSFDQIQKGSKMVGRCRYQSANQQFEGLLGGAEILFDRKRIANEQHGATDLASKPGHVWFKLTLDVRPQAPQGWLDGKGRPALPPEAKHFKTALSNKSKFADQVRPGLRVLSVDLGVRSFAACSVFELVRGGPDQGTYFPAADGRTVDDPEKLWAKHERSFKITLPGENPSRKEEIARRAAMEELRSLNGDIRRLKAILRLSVLQEDDPRTEHLRLFMEAIVDDPAKSALNAELFKGFGDDRFRSTPDLWKQHCHFFHDKAEKVVAERFSRWRTETRPKSSSWQDWRERRGYAGGKSYWAVTYLEAVRGLILRWNMRGRTYGEVNRQDKKQFGTVASALLHHINQLKEDRIKTGADMIIQAARGFVPRKNGAGWVQVHEPCRLILFEDLARYRFRTDRSRRENSRLMRWSHREIVNEVGMQGELYGLHVDTTEAGFSSRYLASSGAPGVRCRHLVEEDFHDGLPGMHLVGELDWLLPKDKDRTANEARRLLGGMVRPGMLVPWDGGELFATLNAASQLHVIHADINAAQNLQRRFWGRCGEAIRIVCNQLSVDGSTRYEMAKAPKARLLGALQQLKNGDAPFHLTSIPNSQKPENSYVMTPTNAGKKYRAGPGEKSSGEEDELALDIVEQAEELAQGRKTFFRDPSGVFFAPDRWLPSEIYWSRIRRRIWQVTLERNSSGRQERAEMDEMPY

SEQ ID NO: 628 - protein, 1097 aa, Unknown
  source: /note="Description of Unknown: Cas12 sequence"
MVTRALNLKLVVPRRPGELTKAEALWSTHDIVNRATSYYESQLLLCRQQDYQTRELTVSAGDQAPDLDALIANARDRNRYRGLEKPQVVREKLRNLYEAIVPPAIGKTGTAQAVGAFVSPLLDADSRGFTEIFDKIEALPNWVDGVRAEEPDALEAAADWLKSPQGKERLRPTGAPPTWIKLAKKKDAGWAAAFVADIDKKLKEVEGTPTLMQELRALGVMPLFPSFFASRIAGHKGAVSTWDRLALRLAVAHLLSWESWVELAAKEHAARVAKLEKFRDDNILGEIADAVEALRLYEKERTEELQQKAQLDAEEVRTTSRTIRGWVDLREKWLKTDASPDALISLVAAEQKRKSGKFGDPQLFRWLAKPENHFVWNKPDFDPPSLFASLRMIEGLVERSKETAWMTLPDARLHPRSSQWEPHGGGNLKTFRLEQGEGGSLSVTLPLLRKSGDDSYVEEEHAFSLAGSKQIPNASLDVRRNKYCLSYRTPTGEEAEAVVGSADLLLDWYFLQQRSEHRPEEGDIGPAFLKLALDITPIDPVWGEREKTPAIHHFKTASGKNTRHADGVAPGFRMLAVDLGIRTLATCSVFELKATAPAGRLSFPIAHLDLHAVHERSFTLTLDGEDPDRDAERWRENKSAELRRLRMGLTRYRNIRNMREDAPDEREVLLEDLQEKVQEHGWAFEEPLLRELAKHKDTPEPIWEAELTKALAQFRSDFGVIVGEWRRSNRARSTDSHAGKSMWAIDHLTNSRRFLMSWSLLSKPGQIRRLDRDKQGVFAKHLLDHLEGLKADRLKTGSDLIVQAARGFRRDKRGNWHKAYKPCHGILFEDLSRYRMRTDRPRRENSQLMKWAHRAVPKEVGMQAEVYGIRVEDTGAAFSSRFHAASHTPGIRMHPICQKDLENEWLLDEIEKQNSGVKRRELKLGQLVQLNGGELFACVTASGVKTLHADINAAQNLQRRFFTRHGDAFRIVARKVLVDEEEVWVPRSLGKRLLGALGSHGKLVPTGHESGSCRFEEITTRAWSKLSGEKLSDDRVGNEEDQIIASIEEEALERTGEVVVFFRDPSGQVLPRDLWYPSKTFWSIVKSTTLSKLKAAP

SEQ ID NO: 629 - protein, 1272 aa, Unknown
  source: /note="Description of Unknown: Cas12 sequence"
MEDKQFLERYKEFIGLNSLSKTLRNSLIPVGSTLKHIQEYGILEEDSLRAQKREELKGIMDDYYRNYIEMHLRDVHDIDWNELFEALTEVKKNQTDDAKKCLEKIQEKKRKEIYQYLSDDAVFSEMFKEKMISGILPDFIRCNEEYSEEEKEEKLKTVALFHRFTSSFNDFFLNRKNVFTKEAIATAIGYRVVHENAEIFLENMVAFQNIQKSAESQISIIERKNEHYFMEWKLSHIFTADYYMMLMTQKAIEHYNEMCGVVNQHMKEYCQKEKKNWNLYRMKRLHKQILSNASTSFKIPEKYENDAEVYESVNSFLQNVMEKTVMERIAVLKNNTDNFDLSKIYITAPYYEKISNYLCGSWNTIADCLTHYYEQQIAGKGARKDQKVKAAVKADKWKSLSEIEQLLKEYARAEEVKRKPEEYIAEIENIVSLKEVHLLEYHPEVNLIENEKYATEIKDVLDNYMELFHWMKWFYIEEAVEKEVNFYGELDDLYEEIRDIVPLYNKVRNYVTQKPYSDTKIKLNFGTPTLANGWSKSKEYDYNAILLQKDGKYYMGIFNPVQKPEKEIIEGHSHPLEGNEYKKMVYYYLPSANKMLPKVLLSKKGMEIYQPSEYIINGYKERRHIKSEEKFDLQFCHDLIDYFKSGIERNPDWKVFGFHFSDTDTYQDISGFYREVEDQGYKIDWTYIKEADIDRLNEEGKLYLFQIYNKDFSEKSTGRENLHTMYLKNLFSEENIREQVLKLNGEAEIFFRKSSVKKPIIHKKGTMLVNRTYMEEMHGESVKKNIPEKEYQEIYNYMNHRWKGELSAEAKEYLKKAVCHETKKDIVKDYRYSVDKFFIHLPITINYRASGKEALNSVAQRYIAHQNDMHVIGIDRGERNLIYVSVINMQGEIIEQKSFNVVNKYNYKEKLKEREQNRDEARKNWKEIGQIKDLKEGYLSGVIHEIAKMMIKYHAIVAMEDLNYGFKRGRFKVERQVYQKFENMLIQKLNYLVFKDRSADEDGGVLRGYQLAYIPDSVKKLGRQCGMIFYVPAAFTSKIDPATGFVDIFNHKAYTTDQAKREFILSFDEICYDVERQLFRFTFDYANFATHNVTLARNNWTIYTNGTRTQKEFVNRRVRDKKEVFDPTEKMLKLLELEGVEYQSGANLLPKLEKISDPHLFHELQRIVRFTVQLRNSKNEENDVDYDHVISPVLNEEGKFFDSSKYENKEEKKESLLPVDADANGAYCIALKGLYIMQAIQKNWSEEKALSPDVLRLNNNDWFDYIQNKRYR

SEQ ID NO: 630 - protein, 767 aa, Unknown; identical to SEQ ID NO: 570
  source: /note="Description of Unknown: Cas12 sequence"

SEQ ID NO: 631 - protein, 1147 aa, Unknown; identical to SEQ ID NO: 4
  source: /note="Description of Unknown: Cas12 sequence"

SEQ ID NO: 632 - protein, 687 aa, Unknown; identical to SEQ ID NO: 605
  source: /note="Description of Unknown: Cas12 sequence"
  MOD_RES (156)..(527): Any amino acid

SEQ ID NO: 633 - protein, 1212 aa, Unknown
  source: /note="Description of Unknown: Cas12 sequence"
MIKKSNFWQFTGLYELSKTLRFELKPVWETLNILEKDWVSQKDKEVEENYNKIKVFFDSLHREFVKQSLENWYLELLENFYNSYIELNKNIENKKNKSLQKLFEKSSKELKKELVSFFEWKWNDWKQKYSFLKKWWIDVLNEKEVLDLMWEFYPKEKELFKKFDKFFTYFSNFKESRKNFYADDWRAWAIATRVIDENLITFIKNIEDFKKFKNNFSDFIENGFSDWKIKINWFTLEEKQVFDLDFYNNCLLQDWIDNYNKILWWFSEENWNKIQWINEKINLFKQNQNKTNSKDVKFPRFKLLYKQILSEKEKLIFVDEIENDEKLINFIKESKNNNLIKVEKAIEITENFIKNNETFELDKIYLSKISINTISNKFFSSWDYILKEGFDKWEIKEFISFEDLKNAFGKIKYENLEDIFKSNYITDYIAINWEDLYKNFLNIFLYEFKQNINEINFYNSELEKLFLEKFEKTETQVQIIKNYFDSVLSLYKMTKYFALEKGKKKIEDLETDNNFYNDFFVYYEDFEIWKDYNLVRNFITKKQVKTDKFKLNFENSQFLTGWDKDKEKERLWIILKKDEKYYLWILKNNKIFNSYNYESWDFYEKMSYKQLNNVYRQLPRFAFSKAKREVYWITPELEQIKEEFDIFQKNKEKWEKFDIEKLKKLINCYKKWFIKTYENEFDLEKIKNTDYLDLATFYDEIEQKTYKIDFNKISENFINAKVNSWELYLFQIYNKDFSETKKAWSKENIHTKYFKLLFDEKNLEKLVIKLSWWAEMFFREKTEKLKTKLDKSWKEVLEHRRYSKDKIMLHLSITLNANKWDSFWFNKMVNEYLNKNEDIKIIWIDRGEKHLAYYSVIDKNWKIEEIDTLNIIKSSDWKITNYLEKLEKIESSRKDSRVSWWEIENIKELKNGYISQVVNKLAELIIKYNAIIVFEDLNIWFKRWRQKIEKQIYQKLELALAKKLNYLTQKDKNDNEVLWNLKALQLVPKVNDYQDIANYKQSGIMFYTRANYTSTTCPCCWFRKNIYISNSDTKEKQKKDFEKIDIKFDGEKFIFSYEIIQDKKAKQKSNKTNFSVNSNFSRFKYNSKKMLVEEVNLNLELQNLFKDIDLKWDINKQILEKDSYFYKSLTYYFNLILQLRNSDSKNDIDYITCPSCNYHSKDWFQGLEYNADANWAYNIARKWIIMLDRIEKNFEKPDLYVSDIDWDNFTQK

SEQ ID NO: 634 - protein, 1212 aa, Unknown; identical to SEQ ID NO: 633
  source: /note="Description of Unknown: Cas12 sequence"

SEQ ID NO: 635 - protein, 1108 aa, Unknown; identical to SEQ ID NO: 33
  source: /note="Description of Unknown: Cas12 sequence"

SEQ ID NO: 636 - protein, 688 aa, Unknown
  source: /note="Description of Unknown: Cas12 sequence"
  MOD_RES (276)..(564): Any amino acid
MAESMYNQQNINQKSTETPTEEDALGIKNPLLTPTTLGQNFLSLQSISPLGSRSINLINWSLISPNQTLLQNFQDNENWQDSSISEFRPFSKNSLTENSPIIEPQSDKTLPSSVPIQLSSELPIQQPPETSFIDSESPIPQPPETPSSDSESPIGQTENIFPFQIDQKTRRNSVIQNSKSSISHFFQKKSEFPREKISQENVNKLTKKSAENQDISTTEESVINSIETNDLQTINPTDIPNPEIPVSTLQKQPDSTIDNIPQTESVSTINPTDIPXXXXXXXXXXXXXXXXXXXXXXXXXXXXXXXXXXXXXXXXXXXXXXXXXXXXXXXXXXXXXXXXXXXXXXXXXXXXXXXXXXXXXXXXXXXXXXXXXXXXXXXXXXXXXXXXXXXXXXXXXXXXXXXXXXXXXXXXXXXXXXXXXXXXXXXXXXXXXXXXXXXXXXXXXXXXXXXXXXXXXXXXXXXXXXXXXXXXXXXXXXXXXXXXXXXXXXXXXXXXXXXXXXXXXXXXXXXXXXXXXXXXXXXXXXXXXXXXXXXXXXXXXXXXXXXXXXXXXXXXXXXXXXXXXSKNNRIPQLITFLKLNQYQQLILQIFLTQKFSFQLSKNNRIPPLITFLKLNQYQQLIPRVLLHQKFLFQLFKNNRIPPLITFPKLNQYQQLIPRIFLTQKFPFQISRNNRIPQLITFPKLNQYQ

SEQ ID NO: 637 - protein, 1003 aa, Unknown
  source: /note="Description of Unknown: Cas13 sequence"
MGAIKNKHIFAAYANLAIDGLIKTLNFIAKKLDTQKQLSSWDIKHVITLIDSIFDQNPQNNLEQVVEGYLPWIKPIIEMKTPKKGERQSDKLCIEYKTIITAFASLLNDVRNYYTHYYHDPICIYPGGYDIPSSLNCIYDSAINIIKERFQAEEKEMEHLRRYTRKKGRVVLKTEDDHFYYTLANNNDLSEKGYAFFISMFLERKYSYLFLKKLSGFKRGDSLQYRLTLEVFTALSTKPPVERLRTTKDTKQDRALDILNELSKIPIELYQTLEPKYREMYNETLQPTDAEDPYGLPDRSRIRFRSRFEAFALHFLDKQADFKEIGFYTYLGNYFHNGYQKTRVDRETKDRYINFQLAGFCKNIQDISAKKLSEALNVKSIDISTDSIPDINSFEPYLVQSTPHYIVNGNNIGIKVLPEGKDTYPTIDEKGAKMPIADFWLSKYELPAMLFYTYLRNNNIHKSHCPLSVKDIIERSIHKSTKQKHPEERSELMLRRVMKAIFWTDSKLNEVERIKSQKSAFGKRQHEILKAGRIAETLVRDMLWLQPSKNNGRDKVTEPNFQAIQVSLAYFGIRRNDLTEIFTRAGLINSSNPHPFLAQIGTNYTSLIEFYIAYLKERKVYFSRIQKKILQGKLNIQCHPLRDLQREPNKPQDKEEAIFLPRGLFNEAIINCLKKSKLKQLIESPTREKSPALNVSYLIQNYFRTYFEDQSQEFYAQPRNYRLFDKLSPNKGKSKSYLSLEQRIKKMEELRPSKIPVAEANKLLEKEDRLYRKNYNEICDNESIIRLYQIQDILLFMMTKEYLPSDLYNRINKYKLENVKGILNERVSYLIDLNPLKIQGEDIKIKDYGKLFYIHHDTRISSLNKVLSKVKRNNSISSSVKIQPYENYKRECLDFEEAQIQIIPIIHSFEIAMVSMFPDLKKATPGNYYDFNELITEYEKRTKQKIGSSFLIKTRNMFLHDKYEAECIKEISDDFVYAKKIIAEFKMKIENIKLEDLSNDSSA

SEQ ID NO: 638 - protein, 986 aa, Unknown
  source: /note="Description of Unknown: Cas13 sequence"
MARDNFLNTIKLLADKMKLGAISGFGKDGNEVNDINKLFGDKNTYANIENVVEFYFPWIKALEGRFSLDKGDRNLNDMKMFYKSVLTAFFTAVDSLRNKYTHYSHKDLNIREIKIECTLGGKDYCIGLLNALDCIYDSAVNLLKLRFMVGEDEVAHLRRCKAVNKKVVVRTEKDGFYYRLSDNGGVTEKGVIFIASMFLNRKYGFLFLKQLEGFKRSDEKRYRLTLEAFLAFSNIKPVDRLKSDKLDRASLGLDMLNELTKIPKELSETLSVDCLYKYLASDGEDDLRSRIRYQDRFVPLALEFISQSDEFKDFRFYTYVGNYVYKGYIKRLIDGTDKERYLSDRLCGFYKSVNDASSDAIAQKYGVEIKDSNEPDYMLPDSFRPHVLRATPHFVINNNNIGIKICGNDCLPIVNGKGVESPEPDYWLSIYELPAMLFYAYLREKNGKRFKDYKSIRELIEGVEKKADEKNDRDKGALMARHIDKEIIWTQTKLDEVKRLEEKKVAAYGKKGRVVLKSGRMADLLAHDMVRLQPATKGSDKITGVNFQALQVSLAYFKRDILADVFSRAMLTTGNHRHPFLYRIDVSHCSSLRDFYVAYLGERRKYFEDVAKKIAKNKLNTPCHILRRLQREGSGEEAGKDVKPKFLPRGIFTDSIKNCLEQSKLNIYIRNARNDVKPAINAAYLILMYYKEIEKGEFQGFYGEKRRYDILEEGKPLDLAERKKALASIKPAKIDVSEANMPMSKEEHLMRKRYHAVCNNESAIRMYQVQDILLLLMAKDIFKKALSEGVMSKKIGLENLNGIFDAPVNFVKNFDNIKLTATGIKIKNYGKVCRLGTDFKFNSLIKAFHKVYSKSVEMDYSDYLKEEEEFEKYRLNMVKLCREVERGITEDLHLSLDGKSHLSFNDDVIKPYNDKYNVFNGDDLTFFINARNMFMHGDYKYECVKYVVSEHFKGSLNDVSFAKETYGHFCNLLESMRKKTGLRIDI

SEQ ID NO: 639 - protein, 1009 aa, Unknown
  source: /note="Description of Unknown: Cas13 sequence"
MKKKISLKEQRNTKKAENKLKYQKAQAERAAAAQQTAAGAESEENPCFDVVKDTKRKALNPLHVEIEAPSAKKSSVKANGLKSLLLTDGKTVMTSFGRGSEANVEKRFDETGTKTFDRDPELFSAKPLETGYRIQRFNASPKDAGLAYRPAGVRPDQIGAKAALEKRYFGKETPGDNIHVQIAYQIQDIEKLLAVYISNIIYAVNNVTGVSAMKDSKGRPVDLLGDYGILGEEGLTKRLQRIPEQADEEAKALQAFLCSERLSYFGKEFCLVRNSPKQPDKEEKRQYKLMRVLCLLGELRQFLVHGKKKEKEFAWLYRLDRQLSQEYRKLLGEFYDAQVDKVNKSFLTNSTVNLEVLFRALKTGTDPERKTVTQEYYQFTVRKEDGNLGFSLKTLREILLSAYKHEVRDKEYDSIRHKLYQLFSFALYHYYKTGVGAERREAFVAKLRAVMTAEAKQRAYADEAAEIWNDEGSGIRAAFLEILEAVDFGSAVKGIKARSSVAGDKRFAEWLEEVRIRPEGVSCFTKLMYLLTRFLDGKEINELLTGLINKLENIQSFLDVMQQEHAETGLSDAFSFFEYSGEIAAELRMTRSFARMAAADPEAKRFMVVDGAKLLGFNPKDTESEDEGIIRAIYGDACAEYLQFSEEEKEAFYVQEGLYGKEREKFSPYAYFHTDTSLRNFIAKNVVESARFRYVIRYVSPEIARKYARQEALVRFALHRVPLLQLRRYYQSCCGPKKDPDAAECVDFLAGVVNRVDFANFTDVRTGDSSKSEQEKKQKYQAIVGLYLTVVYWIVKNLVNVNSRYVMAFHILERDTVLLEGKRLFVGGMKAEDPFLLTDGYVSRQDAYVRKRIGENKRANRHGLNCVLENRNALGSDPASTDAAASLIWSYRNAAAHLTAVAAAQEYVSELREIHSYFEVYHYAMQRYLKSGAEFAELVSKNGPASGKIAAWANAVDRCHSFCKDWLWLLNVPFAYNPARYKNLSIANLFDKNEAAPVTEDASEQKEDE

SEQ ID NO: 640 - protein, 1003 aa, Unknown
  source: /note="Description of Unknown: Cas13 sequence"
MGAIENKHIFAAYANLAIDGLIKTLNFIAKKLDTQKQLSSWDIKHVITLIDSIFDQNPQNNLEQVVEGYLPWIKPIIEMKTPKKGERQSDKLCIEYKTIITAFASLLNDVRNYYTHYYHDPICIYPGGYDIPSSLNCIYDSAINIIKERFQAEEKEMEHLRRYTRKKGRVVLKTEDDHFYYTLANNNDLSEKGYAFFISMFLERKYSYLFLKKLSGFKRGDSLQYRLTLEVFTALSTKPPVERLRTTKDTKQDRALDILNELSKIPIELYQTLEPKYREMYNETLQPTDAEDPYGLPDRSRIRFRSRFEAFALHFLDKQADFKEIGFYTYLGNYFHNGYQKTRVDRETKDRYINFQLAGFCKNIQDISAKKLSEALNVKSIDISTDSIPDINSFEPYLVQSTPHYIVNGNNIGIKVLPEGKDTYPTIDEKGAKMPIADFWLSKYELPAMLFYTYLRNNNIHKSHCPLSVKDIIERSIHKSTKQKHPEERSELMLRRVMKAIFWTDSKLNEVERIKSQKSAFGKRQHEILKAGRIAETLVRDMLWLQPSKNNGRDKVTEPNFQAIQVSLAYFGIRRNDLTEIFTRAGLINSSNPHPFLAQIGTNYTSLIEFYIAYLKERKVYFSRIQKKILQGKLNIQCHPLRDLQREPNKPQEKEEAIFLPRGLFNEAIINCLKKSKLKHLIESPTREKSPALNVSYLIQNYFRAYFEDQSQEFYAQPRNYRLFDNLSPNKGKSKSYLSLEQRIKKMEELRPSKIPVAEANKLLEKEDRLYRKNYNEICDNESIIRLYQIQDILLFMMTKEYLPSDLYNRINKYKLENVKGILNERVSYLIDLNPLKIQGEDIKIKDYGKLFYIHHDTRISSLNKVLSKVKRNNSISSSVKIQPYENYKRECLDFEEAQIQIIPIIHSFEIAMVSMFPDLKKATPGNYYDFNELITEYEKRTKQKIDSSFLIKTRNMFLHDKYEAECIKEISDDFVYAKKIIAEFKMKIENIKLEDFSNDSSA

SEQ ID NO: 641 - protein, 985 aa, Unknown
  source: /note="Description of Unknown: Cas13 sequence"
MGAIENKHIFAAYANLAIDGLIKTLNFIAKKLDTQKQLSSWDIKHVITLIDSIFDQNPQNNLEQVVEGYLPWIKPIIEMKTPKKGERQSDKLCIEYKTIITAFASLLNDVRNYYTHYYHDPICIYPRGYDIPSSLNCIYDSAINIIKERFQAEEKEMEHLRNYTLVNNNGLSEKGYAFFISKFLERKYSYLFLKKLSGFKRGDSLQYRLTLEVFTALSTKPPVERLRTTKDTKQDRALDILNELSRIPIELYQTLEPKYREMYNETLQPTDAEDPYGLPDRSRIRFRSRFEAFALHFLDKQADFKEIGFYTYLGNYFHNGYQKTRVDRETKDRYINFQLAGFCKNIQDISAKKLSEALNVKSIDISTDSIPDINSFEPYLVQSTPHYIVNGNNIGIKVLPEGKDTYPTIDEKGAKMPIADFWLSKYELPAMLFYTYLRNNNIHKSHCPLSVKDIIERSIHKSTKQKHPEERSELMLRRVMKAIFWTDSKLNEVERIKSQKSAFGKRQHEILKAGRIAETLVRDMLWLQPSKNNGRDKVTEPNFQAIQVSLAYFGIRRNDLTEIFTRAGLINSSNPHPFLAQIGTNYTSLIEFYIAYLKERKVYFSRIQKKILQGKLNIQCHPLRDLQREPNKPQEKEEAIFLPRGLFNEAIINCLKKSKLKHLIESPTREKSPALNVSYLIHNYFRAYFEDQSQEFYAQPRNYRLFDKLSPNKGKSKSYLSLEQRIKKMEELRPSKIPVAEANKLLEKEDRLYRKNYNEICDNESIIRLYQIQDILLFMMTKEYLPSDLYNRINKYKLENVKGILNERVSYLIDLNPLKIQGEDIKIKDYGKLFYIHHDTRISSLNKVLSKVKRNNSISSSVKIQPYENYKRECLDFEEAQIQIIPIIHSFEIAMVSMFPDLKKATPGNYYDFNELITEYEKRTKQKIDSSFLIKTRNMFLHDKYEAECIKEISDDFVYAKKIIAEFKMKIENIKLEDLSNDSSA

SEQ ID NO: 642 - protein, 1082 aa, Unknown
  source: /note="Description of Unknown: Cas13 sequence"
CILDFFTQDKAIAEYQLGVEFLQKNLPVIRYLYLPTSHKRFENVPKNQLISEQRNYFKNSLKVLKNLIRDYRNFYTHHFHKPIPVFPETYKLLDDLFLAVANDVKKHRMKTDASKQLLKKGLIEELAQLEKLKLEDLKKLKREGKKVNLNDKEAITNAILNDSFSHLLPKENTISKYYSAVPTEDIDTENGVTISESGIIFLLGLFLTKKQSEDLRSRVKGFKAKLIVNPENPINKKNNSLKYMATHWVFGYLGFKGLKNRFTTTFTKDTLLAQIVDELSKVPDELYQVLPEELKNEFLEDMNEYLKEENSESLDKATVIHPVIRKRYENKFAYFALRFLDEFVDFPTLRFQLHLGNYVHDKREKPIEGTKYVTERIVKEKIKAFAKLSEAAQLKQKYFEEKENHQSIGLQLYPNPSYNFVGNNIPIHLNLNEHFFPKEVKIVAGRLKKRNSSYKSDHPEEYKVRTDNKIKPDAILQDLGKPEKLAPVAMLSLNELPALLHLVLTKKTPEEIEIIIAQKIAERYNVLTNYKAGDDISKGQITKNLLKAKQKKEVNLDKLQLAIEKEIAVTNDKLQTIALHIKERNDPKQKRKYVFTNKEIGLQVTWLANDLKRFMPKGSRQNWRGQHHSQLQKSLAFYDIQPKEPLSLLEEVWDFKNEAYLWNNGIRRSFDKRDFISFYTSYLNNRKETFQRFKDQLNGIRSNKKILDKFIKQQHLWNLFHKRLYVIDTIEEQVEKLLVKPMQFPKGVFDHKPTYIKGKSIQENPECFADWYVAWNQHTDYQKFYSWDRDYKSAYLSGEQEKTEKRFIRVQGSKINKVKQQDVLLAKMASIIFNELYLPEDAEHLDLNLSDIYKTQTERKAEIEAALIQSHKTTGDNSANIIKSTSAWTLTVPYCSKNIYEPQVKLKELGKFKKFIASQKVQTLFEYKPQKIWNKTELEEVLELKANSYEVIRRDYLLKSIQEFEKYMIKKLPTLIDTNEHPNFNKYLTTFLKSLELVSEEDAKWLISKKDFDTTPIDELKKQSKIMEKAFLLVMIRNKFSHNQLPRKIYYDEIYKNVPNAVSINFNELFLEYTNQTILEFK

SEQ ID NO: 643 - protein, 708 aa, Unknown
  source: /note="Description of Unknown: Cas13 sequence"
NRRDMEASPGRLARYIVLKTLYERAFPRWLEAREAETLNGWIGRAADRATVAARHINKDENAAARMAGLVRLADGKGIADFTDRLAAETASEYRVQRGYDSDPAVARKQAKHIEDLRCDVVGQAFEAYLADVARKLAWTMNDPPGGPLPDEKKASLETAAPPAEDAGAEAEEDWLARLYFLLHMLPVEEVGGLRHQLRKWSVLEREPDSVLEREPDADVEAIERILGLYLDMHDAKFEGGDGVAGAEALTDLFTSPAQFRRVCPEDGAGNGGHVPWRGLREMLRFGGGEPRLMWAFRKWPIGDGMVDGLNALEATVAEAHKQREDLHAKWAGKKGFSRKDKDEYRAALETVVVHRHLAAHVQLVNHARLHRLAMAVLARLADYAGLWERDLYFTTLALIRLENGKPEDVFRSRELEWLREGRIVDALKELKKNADGSEPAVGTALQRLFGKGILTGGGTVSVRRDLLHFNMLQRKANEPFNLTTAVNDTRKLMAYDRKLKNAVSRSIIELLAREGLDLAWEMKDHQLAGAVLKTRQAVHLGGAKVGGGPITEDLHGPEFTAMAAALFGGEARAATDAAEAATGRPDRRERKSGGASPRPARPAKTLPAPTPRLLPAAGERVEGVLVEEKTRKGGWKAAVEIGGPRIVGDIFNSGEVPSDAEPGLEAEFVVRVANPANASFMWLSPDVEERLKKAAAPRRGGRPAGRQR

SEQ ID NO: 644 - protein, 1003 aa, Unknown; identical to SEQ ID NO: 640
  source: /note="Description of Unknown: Cas13 sequence"

SEQ ID NO: 645 - protein, 985 aa, Unknown; identical to SEQ ID NO: 641
  source: /note="Description of Unknown: Cas13 sequence"

SEQ ID NO: 646 - protein, 1003 aa, Unknown; identical to SEQ ID NO: 640
  source: /note="Description of Unknown: Cas13 sequence"

SEQ ID NO: 647 - protein, 985 aa, Unknown; identical to SEQ ID NO: 641
  source: /note="Description of Unknown: Cas13 sequence"

SEQ ID NO: 648 - protein, 1000 aa, Unknown
  source: /note="Description of Unknown: Cas13 sequence"
MEEANRYIYGAYFNMARDNFLNTIKLLADKMKLGATSGFGKDGNEVNDINELFGDKNTYANIENVVEFYFPWIKALEGRFSLDKGDRNLNDMKMFYKSVLTAFFTAVDSLRNKYTHYSHKDLNIREIKIECTLGGKDYCIGLLNALDCIYDSAVNLLKLRFMAGEYEVAHLRRCKAVNKKVVVRTEKDGFYYRLSDNGGVTEKGVIFIASMFLNRKYGFLFLKQLEGFKRSDEKRYRLTLETFLAFSNIKPVDRLKSDKLDRASLGLDMLNELTKIPRELSETLSVDCLYKYLTSDGEDDLRSRIRYQDRFVPLALEFISQSDEFKDFRFYTYVGNYVYKGYIKRLIDGTDKERYLSDRLCGFYKSVNDASSDAIAQKYGVEIKDSNEPDYMLPDSFRPHVLRATPHFVINNNNIGIKICGNDCLPIVNGKGVESPEPDYWLSIYELPAMLFYAYLREKNGKLLKDYKSIRELIEDVEKKADEKNDRDKGALMARHIDKEIIWTQTKLDEVKRLEEKKVAAYGKKGRVVLKSGRMADLLAHDMVRLQPATKGSDKITGANFQALQVSLAYFKRDILADVFSRAMLTTGNHRHPFLYRIDVSHCSSLRDFYVAYLGERRKYFEDVAKKIAKNKLNTPCHILRRLQREGSGEEAGKDVKPKFLPRGIFTGSIKSCLEKSALNINIRNARNDVKPAINAAYLILMYYKEIEKGEFQGFYGEKRRYDILEEGKPLDLDERKKALASIKPAKIDVSEANMPMSKEEHLMRKRYHAVCNNESAIRMYQVQDILLLLMAKDIFKKALSEGVMSKKIGLENLNGIFDAPVNFVKNFDNIKLTATGIKIKDYGKVCRLGTDFKFNSLVKAFHKVYSKSVEMDYSDYLKEEEEFEKYRLNMVKLCREVERGITEDLHLSLDGKSHLGFNDDVIKPYNDKYNVFNGGDLTFFINARNMFMHGDYKYECVKYVVSEHFKGSLNDVSFAKETYGHFCNLLESMRKKTGLRIDI

SEQ ID NO: 649 - protein, 1003 aa, Unknown; identical to SEQ ID NO: 637
  source: /note="Description of Unknown: Cas13 sequence"

SEQ ID NO: 650 - protein, 1003 aa, Unknown; identical to SEQ ID NO: 640
  source: /note="Description of Unknown: Cas13 sequence"

SEQ ID NO: 651 - protein, 1003 aa, Unknown
  source: /note="Description of Unknown: Cas13 sequence"
MGAIENKHIFAAYANLAIDGLIKTLNFIAKKLDTQKQLSSWDIKHVITLIDSIFDQNPQNNLEQVVEGYLPWIKPIIEMKTPKKGERQSDKLCIEYKTIITAFASLLNDVRNYYTHYYHDPICIYPGGYDIPSSLNCIYDSAINIIKERFQAEEKEIEHLRRYTRKKGRVVLKTEDDHFYYTLVNNNDLSEKGYAFFISMFLERKYSYLFLKKLSGFKRGDSLQYRLTLEVFTALSTKPPVERLRTTKDTKQDRALDILNELSRIPIELYQTLEPKYREMYNETLQPTDAEDPYGLPDRSRIRFRSRFEAFALHFLDKQADFKEIGFYTYLGNYFHNGYQKTRVDRETKDRYINFQLAGFCKNIQDISAKKLSEALNVKSIDISTDSIPDINSFEPYLVQSTPHYIVNGNNIGIKVLPEGKDTYPTIDEKGAKMPIADFWLSKYELPAMLFYTYLRNNNIHKSHCPLSVKDIIERSIHKSTKQKHPEERSELMLRRVMKAIFWTDSKLNEVERIKSQKSAFGKRQHEILKAGRIAETLVRDMLWLQPSKNNGRDKVTEPNFQAIQVSLAYFGIRRNDLTEIFTRAGLINSSNPHPFLAQIGTNYTSLIEFYIAYLKERKVYFSRIQKKILQGKLNIQCHPLRDLQREPNKPQDKEEAIFLPRGLFNEAIINCLKKSKLKQLIESPTREKSPALNVSYLIQNYFRTYFEDQSQEFYAQPRNYRLFDKLSPNKGKSKSYLSLEQRIKKMEELRPSKIPVAEANKLLEKEDRLYRKNYNEICDNESIIRLYQIQDILLFMMTKEYLPSDLYNRINKYKLENVKGILNERVSYLIDLNPLKIQGEDIKIKDYGKLFYIHHDTRISSLNKVLSKVKRNNSISSSVKIQPYENYKRECLDFEEAQIQIIPIIHSFEIAMVSMFPDLKKATPGNYYDFNELITEYEKRTKQKIDSSFLIKTRNMFLHDKYEAECIKEISDDFVYAKKIIAEFKMKIENIKLEDLSNDSSA

SEQ ID NO: 652 - protein, 1003 aa, Unknown; identical to SEQ ID NO: 640
  source: /note="Description of Unknown: Cas13 sequence"

SEQ ID NO: 653 - protein, 1003 aa, Unknown
  source: /note="Description of Unknown: Cas13 sequence"
MGAIENKHIFAAYANLAIDGLIKTLNFIAKKLDTQKQLSSWDIKHVITLIDSIFDQNPQNNLEQVVEGYLPWIKPIIEMKTPKKGERQSDKLCIEYKTIITAFASLLNDVRNYYTHYYHDPICIYPGGYDIPSSLNCIYDSAINIIKERFQAEEKEMEHLRRYTRKKGRVVLKTEDDHFYYTLANNNDLSEKGYAFFISMFLERKYSYLFLKKLSGFKRGDSLQYRLTLEVFTALSTKPPVERLRTTKDTKQDRALDILNELSKIPIELYQTLEPKYREMYNETLQPTDAEDPYGLPDRSRIRFRSRFETFALHFLDKQPDFKEIGFYTYLGNYFHNGYQKTRVDRETKDRYINFQLAGFCKNIQDISAKKLSEALNVKSIDISTDSIPDINSFEPYLVQSMPHYIVNGNNIGIKVLPEGKDTYPTIDEKGAKMPIADFWLSKYELPAMLFYTYLRNNNIHKSHCPLSVKDIIERSIHKSTKQKHPEERSELMLRRVMKAIFWTDSKLNEVERIKSQKSAFGKRQHEILKAGRIAEMLVRDMLWLQPSKNNGRDKVTEPNFQAIQVSLAYFGIRRNDLTEIFTRAGLINSSNPHPFLAQIGTNYTSLIEFYIAYLKERKVYFSRIQKKILQGKLNIQCHPLRDLQREPNKPQEKEEAIFLPRGLFNEAIINCLKKSKLKQLIESPTREKSPALNVSYLIQNYFRAYFEDQSQEFYAQPRNYRLFDKLSPNKGKSKSYLSLEQRIKKMEELRPSKIPVAEANKLLEKEDRLYRKNYNEICDNESIIRLYQIQDILLFMMTKEYLPSDLYNRINKYKLENVKGILNERVSYLIDLNPLKIQGEDIKIKDYGKLFYIHHDTRISSLNKVLSKVKRNNSISSSVKIQPYENYKRECLDFEEAQIQIIPIIHSFEIAMVSMFPDLKKATPGNYYDFNELITEYEKRTKQKIDSSFLIKTRNMFLHDKYEAECIKEISDDFVYAKKIIAEFKMKIENIKLEDLSNDSSA

SEQ ID NO: 654 - protein, 985 aa, Unknown; identical to SEQ ID NO: 641
  source: /note="Description of Unknown: Cas13 sequence"

SEQ ID NO: 655 - protein, 1003 aa, Unknown; identical to SEQ ID NO: 651
  source: /note="Description of Unknown: Cas13 sequence"

SEQ ID NO: 656 - protein, 1003 aa, Unknown
  source: /note="Description of Unknown: Cas13 sequence"
MGAIENKHIFAAYANLAIDGLIKTLNFIAKKLDTQKQLSSWDIKHVITLIDSIFDQNPQNNLEQVVEGYLPWIKPIIEMKTPKKGERQSDKLCIEYKTIITAFASLLNDVRNYYTHYYHDPICIYPGGYDIPSSLNCIYDSAINIIKERFQAEEKEMEHLRRYTRKKGRVVLKTEDDHFYYTLANNNDLSEKGYAFFISMFLERKYSYLFLKKLSGFKRGDSLQYRLTLEVFTALSTKPPVERLRTTKDTKQDRALDILNELSRIPIELYQTLEPKYREMYNETLQPTDAEDPYGLPDRSRIRFRSRFEAFALHFLDKQADFKEIGFYTYLGNYFHNGYQKTRVDRETKDRYINFQLAGFCKNIQDISAKKLSEALNVKSIDISTDSIPDINSFEPYLVQSTPHYIVNGNNIGIKVLPEGKDTYPTIDEKGAKMPIADFWLSKYELPAMLFYTYLRNNNIHKSHCPLSVKDIIERSIHKSTKQKHPEERSELMLRRVMKAIFWTDSKLNEVERIKSQKSAFGKRQHEILKAGRIAETLVRDMLWLQPSKNNGRDKVTEPNFQAIQVSLAYFGIRRNDLTEIFTRAGLINSSNPHPFLAQIGTNYTSLIEFYIAYLKERKVYFSRIQKKILQGKLNIQCHPLRDLQREPNKPQEKEEAIFLPRGLFNEAIINCLKKSKLKQLIESPTREKSPALNVSYLILNYFRTYFEDQSQEFYAQPRNYRLFDKLSPNKGKSKSYLSLEQRIKKMEELRPSKIPVAEANKLLEKEDRLYRKNYNEICDNESIIRLYQIQDILLFMMTKEYLPSDLYNRINKYKLENVKGILNERVSYLIDLNPLKIQGEDIKIKDYGKLFYIHHDTRINSLNKVLSKVKRNNSISSSVKIQPYENYKRECLDFEEAQIQIIPIIHSFEIAMVSMFPDLKKATPGNYYDFNELITEYEKRTKQKIDSSFLIKTRNMFLHDKYEAECIKEISDDFVYAKKIIAEFKMKIENIKLEDFSNDSSA

SEQ ID NO: 657 - protein, 1003 aa, Unknown
  source: /note="Description of Unknown: Cas13 sequence"
MGAIENKHIFAAYANLAIDGLIKTLNFIAKKLDTQKQLSSWDIKHVITLIDSIFDQNPQNNLEQVVEGYLPWIKPIIEMKTPKKGERQSDKLCIEYKTIITAFASLLNDVRNYYTHYYHDPICIYPGGYDIPSSLNCIYDSAINIIKERFQAEEKEMEHLRRYTRKKGRVVLKTEDDHFYYTLANNNDLSEKGYAFFISMFLERKYSYLFLKKLSGFKRGDSLQYRLTLEVFTALSTKPPVERLRTTKDTKQDRALDILNELSKIPIELYQTLEPKYREMYNETLQPTDAEDPYGLPDRSRIRFRSRFEAFALHFLDKQADFKEIGFYTYLGNYFHNGYQKTRVDRETKDRYINFQLAGFCKNIQDISAKKLSEALNVKSIDISTDSIPDINSFEPYLVQSTPHYIVNGNNIGIKVLPEGKDTYPTIDEKGAKMPIADFWLSKYELPAMLFYTYLRNNNIHKSHCPLSVKDIIERSIHKSTKQKHPEERSELMLRRVMKAIFWTDSKLNEVERIKSQKSAFGKRQHEILKAGRIAETLVRDMLWLQPSKNNGRDKVTEPNFQAIQVSLAYFGIRRNDLTEIFTRAGLINSSNPHPFLAQIGTNYTSLIEFYIAYLKERKVYFSRIQKKILQGKLNIQCHPLRDLQREPNKPQEKEEAIFLPRGLFNEAIINCLKKSKLKHLIESPTREKSPALNVSYLIQNYFRAYFEDQSQEFYAQPRNYRLFDKLSPNKGKSKSYLSLEQRIKKMEELRPSKIPVAEANKLLEKEDRLYRKNYNEICDNESIIRLYQIQDILLFMMTKEYLPSDLYNRINKYKLENVKGILNERVSYLIDLNPLKIQGEDIKIKDYGKLFYIHHDTRISSLNKVLSKVKRNNSISSSVKIQPYENYKRECLDFEEAQIQIIPIIHSFEIAMVSMFPDLKKATPGNYYDFNELITEYEKRTKQKIDSSFLIKTRNMFLHDKYEAECIKEISDDFVYAKKIIAEFKMKIENIKLEDLSNDSSA

SEQ ID NO: 658 - protein, 1003 aa, Unknown
  source: /note="Description of Unknown: Cas13 sequence"
MGAIENKHIFAAYANLAIDGLIKTLNFIAKKLDTQKQLSSWDIKHVITLIDSIFDQNPQNNLEQVVEGYLPWIKPIIEMKTPKKGERQSDKLCIEYKTIITAFASLLNDVRNYYTHYYHDPICIYPGGYDIPSSLNCIYDSAINIIKERFQAEEKEMEHLRRYTRKKGRVVLKTEDDHFYYTLANNNDLSKKGYAFFISMFLERKYSYLFLKKLSGFKRGDSLQYRLTLEVFTALSTKPPVERLRTTKDTKQDRALDILNELSRIPIELYQTLEPKYREMYNETLQPTDAEDPYGLPDRSRIRFRSRFEAFALHFLDKQADFKEIGFYTYLGNYFHNGYQKTRVDRETKDRYINFQLAGFCKNIQDISAKKLSEALNVKSIDISTDSIPDINSFEPYLVQSTPHYIVNGNNIGIKVLPEGKDTYPTIDEKGAKMPIADFWLSKYELPAMLFYTYLRNNNIHKSHCPLSVKDIIERSIHKSTKQKHPEERSELMLRRVMKAIFWTDSKLNEVERIKSQKSAFGKRQHEILKAGRIAETLVRDMLWLQPSKNNGRDKVTEPNFQAIQVSLAYFGIRRNDLTEIFTRAGLINSSNPHPFLAQIGTNYTSLIEFYIAYLKERKVYFSRIQKKILQGKLNIQCHPLRDLQREPNKPQEKEEAIFLPRGLFNEAIINCLKKSKLKQLIESPTREKSPALNVSYLILNYFRTYFEDQSQEFYAQPRNYRLFDKLSPNKGKSKSYLSLEQRIKKMEELRPSKIPVAEANKLLEKEDRLYRKNYNEICDNESIIRLYQIQDILLFMMTKEYLPSDLYNRINKYKLENVKGILNERVSYLIDLNPLKIQGEDIKIKDYGKLFYIHHDTRINSLNKVLSKVKRNNSISSSVKIQPYENYKRECLDFEEAQIQIIPIIHSFEIAMVSMFPDLKKATPGNYYDFNELITEYEKRTKQKIDSSFLIKTRNMFLHDKYEAECIKEISDDFVYAKKIIAEFKMKIENIKLEDFSNDSSA

SEQ ID NO: 659 - protein, 1150 aa, Unknown
  source: /note="Description of Unknown: Cas13 sequence"
MKHVFAAYFSDARLNIMASLNDVREKSGLKRYKNEAENVQNFEGIFPKNIASDIRDKRITLLRIRFPFIETIVDPGRGKENPASKYGELSWLFQLVNDMRNVFIHSTGSEEEIDYQHHKKIFNALRKVYDCGLRTVKSRFQLENDTTMPLLRCDNRGRPKPFNKFSLALCTSPERNGNKKQSDVLHDFGRVLLCSLFLEKRQISGLVSHFWDKNGYGTDWNDSEQTIIRELLYVNRIRLPSQRLRTDSTLTSVTLDTISELARCPRPLFELLDADGQENFRVGRSPKNPQNRNDDPSYLLLRGHQSRFIPLAMRHLDFDSKCKLRFAVDLGQYYHSVRLKPAESFIDGNPGIRRLGQKIIAFGRLKDFEDAEKPEIWKKLEENGQKFAEEEEELLKRASITGSPEELKPYIIKTFPHYHLYRDKIGFCIDWEEKKDQKVKYPNLGVRGEDSKSTDSGGIKKRENRQLSRHQFWISPNKIIDLAFYHYLQTEIKQEITASVKTGRKKCPYPSVENILKEYYEGMVVLIKELKEQGPLPPWTEIPQISERRAECHRWINKEIIKAENFTISLADLPKAIRRHLKVLDSRETSVSDIIKRTKTMIEETCKKQKEIEYLLKYPKKRGKKGFRPIKHGNIADFLTEDLLRFQPKDSSKKNGGKLTSKNYQILQKAIAYYDKPYCIVDLLKKSGLLEGEFKHPFLCKIITEENHEQYSTLIDFYQKYLEERKAFLEGFIDTFVAGSSIPGWLRLRKPSTFESWLDQQLDEDEKLCQPLPVPKSLFYQMLLKMTAEKLDLTPEMLCKKGTQRFIRDSQEVEVKPSVSWFIRQYMEHRDDTAQEMYMFKRRHELFDFFHDKKKTTKKLHEEKTCCLSEKVRQEELESVHKGIEKLKKLLRTYKRSEKKIRHFSTMDMVLYLLAKKNFEKLILCDETSGPDWSLKTLETKILSTKIKYELNVPGTDRTIVHRACAIKKTGELRLLVRDRRLPSLLDYYPKTEKSIDQEEIKVELADYSCKRIEAMKLISDLEQKIEESCNRGFCKPVPDKLKKIFGAKKHGTLLYALYHRFHEEKDKSVDEQGFNKDCFAHARQIRNAFAHNEYPVSEQFNQIVRQVNETSQPHNHNSPVNHPKIADQLVKELDKLYKPWRNFLKRIAG

SEQ ID NO: 660 - protein, 985 aa, Unknown; identical to SEQ ID NO: 641
  source: /note="Description of Unknown: Cas13 sequence"

SEQ ID NO: 661 - protein, 985 aa, Unknown; identical to SEQ ID NO: 641
  source: /note="Description of Unknown: Cas13 sequence"

SEQ ID NO: 662 - protein, 1003 aa, Unknown; identical to SEQ ID NO: 640
  source: /note="Description of Unknown: Cas13 sequence"

SEQ ID NO: 663 - protein, 985 aa, Unknown; identical to SEQ ID NO: 641
  source: /note="Description of Unknown: Cas13 sequence"

SEQ ID NO: 664 - protein, 1003 aa, Unknown; identical to SEQ ID NO: 637
  source: /note="Description of Unknown: Cas13 sequence"

SEQ ID NO: 665 - protein, 1003 aa, Unknown; identical to SEQ ID NO: 658
  source: /note="Description of Unknown: Cas13 sequence"

SEQ ID NO: 666 - protein, 985 aa, Unknown
  source: /note="Description of Unknown: Cas13 sequence"
MGAIENKHIFAAYANLAIDGLIKTLNFIAKKLDTQKQLSSWDIKHVITLIDSIFDQNPQNNLEQVVEGYLPWIKPIIEMKTPKKGERQSDKLCIEYKTIITAFASLLNDVRNYYTHYYHDPICIYPGGYDIPSSLNCIYDSAINIIKERFQAEEKEMKHLRNYTLVNNNGLSEKGYAFFISKFLERKYSYLFLKKLSGFKRGDSLQYRLTLEVFTALSTKPPVERLRTTKDTKQDRALDILNELSKIPIELYQTLEPKYREMYNETLQPTDAEDPYGLPDRSRIRFRSRFEAFALHFLDKQADFKEIGFYTYLGNYFHNGYQKTRVDRETKDRYINFQLAGFCKNIQDISAKKLSEALNVKSIDISTDSIPDINSFEPYLVQSTPHYIVNGNNIGIKVLPEGKDTYPTIDEKGAKMPIADFWLSKYELPAMLFYTYLRNNNIHKSHCPLSVKDIIERSIHKSTKQKHPEERSELMLRRVMKAIFWTDSKLNEVERIKSQKSAFGKRQHEILKAGRIAETLVRDMLWLQPSKNNGRDKVTEPNFQAIQVSLAYFGIRRNDLTEIFTRAGLINSSNPHPFLAQIGTNYTSLIEFYIAYLKERKVYFSRIQKKILQGKLNIQCHPLRDLQREPNKPQEKEEAIFLPRGLFNEAIINCLKKSKLKQLIESPTREKSPALNVSYLIQNYFRTYFEDQSQEFYAQPRNYRLFDKLSPNKGKSKSYLSLEQRIKKMEELRPSKIPVAEANKLLEKEDRLYRKNYNEICDNESIIRLYQIQDILLFMMTKEYLPSDLYNRINKYKLENVKGILNERVSYLIDLNPLKIQGEDIKIKDYGKLFYIHHDTRINSLNKVLSKVKRNNSISSSVKIQPYENYKRECLDFEEAQIQIIPIIHSFEIAMVSMFPDLKKATPGNYYDFNELITEYEKRTKQKIDSSFLIKTRNMFLHDKYEAECIKEISDDLVYAKKIIAEFKMKIENIKLEDLSNDSSA

SEQ ID NO: 667 - protein, 1003 aa, Unknown; identical to SEQ ID NO: 637
  source: /note="Description of Unknown: Cas13 sequence"

SEQ ID NO: 668 - protein, 1003 aa, Unknown; identical to SEQ ID NO: 656
  source: /note="Description of Unknown: Cas13 sequence"

SEQ ID NO: 669 - protein, 1003 aa, Unknown; identical to SEQ ID NO: 640
  source: /note="Description of Unknown: Cas13 sequence"

SEQ ID NO: 670 - protein, 985 aa, Unknown; identical to SEQ ID NO: 641
  source: /note="Description of Unknown: Cas13 sequence"

SEQ ID NO: 671 - protein, 1003 aa, Unknown
  source: /note="Description of Unknown: Cas13 sequence"
MGAIENKHIFAAYANLAIDGLIKTLNFIAKKLDTQKQLSSWDIKHVITLIDSIFDQNPQNNLEQVVEGYLPWIKPIIEMKTPKKGERQSDKLCIEYKTIITAFASLLNDVRNYYTHYYHDPICIYPGGYDIPSSLNCIYDSAINIIKERFQAEEKEMEHLRRYTRKKGRVVLKTEDDHFYYTLANNNDLSEKGYAFFISMFLERKYSYLFLKKLSGFKRGDSLQYRLTLEVFTALSTKPPVERLRTTKDTKQDRALDILNELSRIPIELYQTLEPKYREMYNATLQPTDAEDPYGLPDRSRIRFRSRFEAFALHFLDKQADFKEIGFYTYLGNYFHNGYQKTRVDRETKDRYINFQLAGFCKNIQDISAKKLSEALNVKSIDISTDSIPDINSFEPYLVQSTPHYIVNGNNIGIKVLPEGKDTYPTIDEKGAKMPIADFWLSKYELPAMLFYTYLRNNNIHKSHCPLSVKDIIERSIHKSTKQKHPEERSELMLRRVMKAIFWTDSKLNEVERIKSQKSAFGKRQHEILKAGRIAETLVRDMLWLQPSKNNGRDKVTEPNFQAIQVSLAYFGIRRNDLTEIFTRAGLINSSNPHPFLAQIGTNYTSLIEFYIAYLKERKVYFSRIQKKILQGKLNIQCHPLRDLQREPNKPQEKEEAIFLPRGLFNEAIINCLKKSKLKQLIESPTREKSPALNVSYLILNYFRTYFEDQSQEFYAQPRNYRLFDKLSPNKGKSKSYLSLEQRIKKMEELRPSKIPVAEANKLLEKEDRLYRKNYNEICDNESIIRLYQIQDILLFMMTKEYLPSDLYNRINKYKLENVKGILNERVSYLIDLNPLKIQGEDIKIKDYGKLFYIHHDTRINSLNKVLSKVKRNNSISSSVKIQPYENYKRECLDFEEAQIQIIPIIHSFEIAMVSMFPDLKKATPGNYYDFNELITEYEKRTKQKIDSSFLIKTRNMFLHDKYEAECIKEISDDFVYAKKIIAEFKMKIENIKLEDFSNDSSA

SEQ ID NO: 672 - protein, 1003 aa, Unknown; identical to SEQ ID NO: 653
  source: /note="Description of Unknown: Cas13 sequence"

SEQ ID NO: 673 - protein, 1003 aa, Unknown; identical to SEQ ID NO: 637
  source: /note="Description of Unknown: Cas13 sequence"

SEQ ID NO: 674 - protein, 1359 aa, Unknown
  source: /note="Description of Unknown: Cas13 sequence"
MGKLYGYKRWYEIEQNNGEKGSFKRKIRVKRVYDEESKSYVVRRDEVEDTELIKNKNFIINLKDYKTRNSNIQKFYDKFHVGNILFKLKASVKKGKKTFYKDLEKAETVLTNVEILEQTIKLANNSKINRKKLEKELTQLNINEKSEEVTIDNIKIYLRQGEKFDKKENINAIKWRKLTSEELTIKVEIYRECQSINSNLYSLLDYVLSNEEYDDRYYLEEVENKLLIFGTGNKNKNGRNYYYFDYVLKSLSKIKGLIKKDDRNLNYLMFLFNIQKTSENKEHFINKIFNYFKYEVRIEKEDIVEFLVGELEYYDLIKRIEKKPSENQNQTNLEKTYILLDKHEKLKETIDTKNEIVQKLTIELKNNNLRNRIEIILHKYKILELVDKLNKNIKNGKINTELYGIYKEHYGQCIEYINFNELALEEKELYKIIYRYLKGRIEKLLQNRNKIKIGELRIEDIFIFQKLLEKIEIRVKQYLLEHILYLGKLKHHNIDEVNTIRFVEEHANEELSLELITLFSATNVELNRLLKVKGENGSYEKDYDFFSAKPDKGKIKIKDTNSVMKFELLKKLKFINSEATETNQEAIDFLKEAYNLRNNILHGKNEEIIEDNKKNLSKSYKNINELIEELRPSDNEICKSLNLDIIFKGNRKINDINAKLFGNNREKIYLPSFSKLVPEIKNIIESYDKNGTFNDERIKKIVLNGAIYVNKILYLKECSNKDGEFIKNLKEELNKDSKEKSKYVSIEELYKKSQISASKGNKKAIYKYQRKIIEIYLKYLKENYVEILDFSKLNLNIEQIENDIKNRKNSENKVLIESIKQKVFPENDFEYIISIFALLNDNIFINKIRNRFFSTDTWLKNNRYSNIIKILDEVISVNLLRTELLNTSIDIEEIKDDVLTEDIENIIPEIREEILQRTKKDFKTLLGNNAISKEGLSNEDIDKIRNIEDAKINLDFVNNEIKVSLKEYGSLPPNGVLSRNTSKYYNNEIAKKIDQISILTFTKKSIGTISDEKFRNIYWQERKESDESKKIFVYNKNILYLVTKHSFEKLYKNFLEEELNNLKLEDTKYLRDLDLRREKNLKVDNTLKEINEKVRGYSKEYKKKFIENLKNNDEYFGKVVSGRFKNYQEFKEIYDEVSEYKKIRDVVNFNPLNKVYNYLIEINWKLAIQMARAERDLHYIVNGLNELKLIELNQGQNDGISRAYPKYKLNKEKNKKELRLEECHYNFDIDNYKKFEKICEKLGIDLSENGELQQENETNIRNYISHFYILRKPFVDISISEAIKRVSKLLSYRTRYNNSTYSSVFEVFKKDVELNYDFLKKKIELNGKTYDEVVQRKKISCLELESYLDYKPIIKKILF

SEQ ID NO: 675 - protein, 1003 aa, Unknown; identical to SEQ ID NO: 640
  source: /note="Description of Unknown: Cas13 sequence"

SEQ ID NO: 676 - protein, 1003 aa, Unknown; identical to SEQ ID NO: 637
  source: /note="Description of Unknown: Cas13 sequence"

SEQ ID NO: 677 - protein, 1003 aa, Unknown; identical to SEQ ID NO: 637
  source: /note="Description of Unknown: Cas13 sequence"

SEQ ID NO: 678 - protein, 1359 aa, Unknown; identical to SEQ ID NO: 674
  source: /note="Description of Unknown: Cas13 sequence"

SEQ ID NO: 679 - protein, 1003 aa, Unknown
  source: /note="Description of Unknown: Cas13 sequence"
MGAIENKHIFAAYANLAIDGLIKTLNFIAKKLDTQKQLSSWDIKHVITLIDSIFDQNPQNNLEQVVEGYLPWIKPIIEMKTPKKGERQSDKLCIEYKTIITAFASLLNDVRNYYTHYYHDPICIYPGGYDIPSSLNCIYDSAINIIKERFQAEEKEIEHLRRYTRKKGRVVLKTEDDHFYYTLVNNNDLSEKGYAFFISMFLERKYSYLFLKKLSGFKRGDSLQYRLTLEVFTALSTKPPVERLRTTKDTKQDRALDILNELSRIPIELYQTLEPKYREMYNETLQPTDAEDPYGLPDRSRIRFRSRFEAFALHFLDKQADFKEIGFYTYLGNYFHNGYQKTRVDRETKDRYINFQLAGFCKNIQDISAKKLSEALNVKSIDISTDSIPDINSFEPYLVQSTPHYIVNGNNIGIKVLPEGKDTYPTIDEKGAKMPIADFWLSKYELPAMLFYTYLRNNNIHKSHCPLSVKDIIERSIHKSTKQKHPEERSELMLRRVMKAIFWTDSKLNEVERIKSQKSAFGKRQHEILKAGRIAETLVRDMLWLQPSKNNGRDKVTEPNFQAIQVSLAYFGIRRNDLTEIFTRAGLINSSNPHPFLAQIGTNYTSLIEFYIAYLKERKVYFSRIQKKILQGKLNIQCHPLRDLQREPNKPQDKEEAIFLPRGLFNEAIINCLKKSKLKQLIESPTREKSPALNVSYLIQNYFRTYFEDQSQEFYAQPRNYRLFDKLSPNKGKSKSYLSLEQRIKKMEELRPSKIPVAEANKLLEKEDRLYRKNYNEICDNESIIRLYQIQDILLFMMTKEYLPSDLYNRINKYKLENVKGILNERVSYLIDLNPLKIQGEDIKIKDYGKLFYIHHDTRISSLNKVLSKVKRNNSISSSVKIQPYENYKRECLDFEEAQIQIIPIIHSFEIAMVSMFPDLKKATPGNYYDFNELITEYEKRTKQKIDSSFRIKTRNMFLHDKYEAECIKEISDDFVYAKKIIAEFKMKIENIKLEDLSNDSSA

SEQ ID NO: 680 - protein, 1003 aa, Unknown; identical to SEQ ID NO: 640
  source: /note="Description of Unknown: Cas13 sequence"

SEQ ID NO: 681 - protein, 1003 aa, Unknown
  source: /note="Description of Unknown: Cas13 sequence"
MGAIENKHIFAAYANLAIDGLIKTLNFIAKKLDTQKQLSSWDIKHVITLIDSIFDQNPQNNLEQVVEGYLPWIKPIIEMKTPKKGERQSDKLCIEYKTIITAFASLLNDVRNYYTHYYHDPICIYPGGYDIPSSLNCIYDSAINIIKERFQAEEKEMEHLRRYIRKKGRVVLKTEDDHFYYTLANNNDLSEKGYAFFISMFLERKYSYLFLKKLSGFKRGDSLQYRLTLEVFTALSTKPPVERLRTTKDTKQDRALDILNELSRIPIELYQTLEPKYREMYNETLQPTDAEDPYGLPDRSRIRFRSRFEAFALHFLDKQADFKEIGFYTYLGNYFHNGYQKTRVDRETKDRYINFQLAGFCKNIQDISAKKLSEALNVKSIDISTDSIPDINSFEPYLVQSTPHYIVNGNNIGIKVLPEGKDTYPTIDEKGAKMPIADFWLSKYELPAMLFYTYLRNNNIHKSHCPLSVKDIIERSIHKSTKQKHPEERSELMLRRVMKAIFWTDSKLNEVERIKSQKSAFGKRQHEILKAGRIAETLVRDMLWLQPSKNNGRDKVTEPNFQAIQVSLAYFGIRRNDLTEIFTRAGLINSSNPHPFLAQIGTNYTSLIEFYIAYLKERKVYFSRIQKKILQGKLNIQCHPLRDLQREPNKPQEKEEAIFLPRGLFNEAIINCLKKSKLKQLIESPTREKSPVLNVSYLIQNYFRAYFEDQSQEFYAQPRNYRLFDKLSPNKGKSKSYLSLEQRIKKMEELRPSKIPVAEANKLLEKEDRLYRKNYNEICDNESIIRLYQIQDILLFMMTKEYLPSDLYNRINKYKLENVKGILNERVSYLIDLNPLKIQGEDIKIKDYGKLFYIHHDTRISSLNKVLSKVKRNNSISSSVKIQPYENYKRECLDFEEAQIQIIPIIHSFEIAMVSMFPDLKKATPGNYYDFNELITEYEKRTKQKIDSSFLIKTRNMFLHDKYEAECIKEISDDFVYAKKIIAEFKMKIENIKLEDFSNDSSA

SEQ ID NO: 682 - protein, 985 aa, Unknown; identical to SEQ ID NO: 666
  source: /note="Description of Unknown: Cas13 sequence"

SEQ ID NO: 683 - protein, 1003 aa, Unknown; identical to SEQ ID NO: 637
  source: /note="Description of Unknown: Cas13 sequence"

SEQ ID NO: 684 - protein, 1003 aa, Unknown; identical to SEQ ID NO: 656
  source: /note="Description of Unknown: Cas13 sequence"

SEQ ID NO: 685 - protein, 1003 aa, Unknown; identical to SEQ ID NO: 640
  source: /note="Description of Unknown: Cas13 sequence"

SEQ ID NO: 686 - protein, 1003 aa, Unknown; identical to SEQ ID NO: 640
  source: /note="Description of Unknown: Cas13 sequence"

SEQ ID NO: 687 - protein, 1095 aa, Unknown
  source: /note="Description of Unknown: Cas13 sequence"
MEKPLLPNVYTLKHKFFWGAFLNIARHNAFITICHINEQLGLKTPSNDDKIVDVVCETWNNILNNDHDLLKKSQLTELILKHFPFLTAMCYHPPKKEGKKKGHQKEQQKEKESEAQSQAEALNPSKLIEALEILVNQLHSLRNYYSHYKHKKPDAEKDIFKHLYKAFDASLRMVKEDYKAHFTVNLTRDFAHLNRKGKNKQDNPDFNRYRFEKDGFFTESGLLFFTNLFLDKRDAYWMLKKVSGFKASHKQREKMTTEVFCRSRILLPKLRLESRYDHNQMLLDMLSELSRCPKLLYEKLSEENKKHFQVEADGFLDEIEEEQNPFKDTLIRHQDRFPYFALRYLDLNESFKSIRFQVDLGTYHYCIYDKKIGDEQEKRHLTRTLLSFGRLQDFTEINRPQEWKALTKDLDYKETSNQPFISKTTPHYHITDNKIGFRLGTSKELYPSLEIKDGANRIAKYPYNSGFVAHAFISVHELLPLMFYQHLTGKSEDLLKETVRHIQRIYKDFEEERINTIEDLEKANQGRLPLGAFPKQMLGLLQNKQPDLSEKAKIKIEKLIAETKLLSHRLNTKLKSSPKLGKRREKLIKTGVLADWLVKDFMRFQPVAYDAQNQPIKSSKANSTEFWFIRRALALYGGEKNRLEGYFKQTNLIGNTNPHPFLNKFNWKACRNLVDFYQQYLEQREKFLEAIKNQPWEPYQYCLLLKIPKENRKNLVKGWEQGGISLPRGLFTEAIRETLSEDLMLSKPIRKEIKKHGRVGFISRAITLYFKEKYQDKHQSFYNLSYKLEAKAPLLKREEHYEYWQQNKPQSPTESQRLELHTSDRWKDYLLYKRWQHLEKKLRLYRNQDVMLWLMTLELTKNHFKELNLNYHQLKLENLAVNVQEADAKLNPLNQTLPMVLPVKVYPATAFGEVQYHKTPIRTVYIREEHTKALKMGNFKALVKDRRLNGLFSFIKEENDTQKHPISQLRLRRELEIYQSLRVDAFKETLSLEEKLLNKHTSLSSLENEFRALLEEWKKEYAASSMVTDEHIAFIASVRNAFCHNQYPFYKEALHAPIPLFTVAQPTTEEKDGLGIAEALLKVLREYCEIVKSQI

SEQ ID NO: 688 - protein, 1095 aa, Unknown; identical to SEQ ID NO: 687
  source: /note="Description of Unknown: Cas13 sequence"

SEQ ID NO: 689 - protein, 1008 aa, Unknown; identical to SEQ ID NO: 60
  source: /note="Description of Unknown: Cas13 sequence"

SEQ ID NO: 690 - protein, 1095 aa, Unknown; identical to SEQ ID NO: 687
  source: /note="Description of Unknown: Cas13 sequence"

SEQ ID NO: 691 - protein, 1224 aa, Unknown
  source: /note="Description of Unknown: Cas13 sequence"
MENKTSLGNNIYYNPFKPQDKSYFAGYFNAAMENTDSVFRELGKRLKGKEYTSENFFDAIFKENISLVEYERYVKLLSDYFPMARLLDKKEVPIKERKENFKKNFKGIIKAVRDLRNFYTHKEHGEVEITDEIFGVLDEMLKSTVLTVKKKKVKTDKTKEILKKSIEKQLDILCQKKLEYLRDTARKIEEKRRNQRERGEKELVAPFKYSDKRDDLIAAIYNDAFDVYIDKKKDSLKESSKAKYNTKSDPQQEEGDLKIPISKNGVVFLLSLFLTKQEIHAFKSKIAGFKATVIDEATVSEATVSHGKNSICFMATHEIFSHLAYKKLKRKVRTAEINYGEAENAEQLSVYAKETLMMQMLDELSKVPDVVYQNLSEDVQKTFIEDWNEYLKENNGDVGTMEEEQVIHPVIRKRYEDKFNYFAIRFLDEFAQFPTLRFQVHLGNYLHDSRPKENLISDRRIKEKITVFGRLSELEHKKALFIKNTETNEDREHYWEIFPNPNYDFPKENISVNDKDFPIAGSILDREKQPVAGKIGIKVKLLNQQYVSEVDKAVKAHQLKQRKASKPSIQNIIEEIVPINESNPKEAIVFGGQPTAYLSMNDIHSILYEFFDKWEKKKEKLEKKGEKELRKEIGKELEKKIVGKIQAQIQQIIDKDTNAKILKPYQDGNSTAIDKEKLIKDLKQEQNILQKLKDEQTVREKEYNDFIAYQDKNREINKVRDRNHKQYLKDNLKRKYPEAPARKEVLYYREKGKVAVWLANDIKRFMPTDFKNEWKGEQHSLLQKSLAYYEQCKEELKNLLPEKVFQHLPFKLGGYFQQKYLYQFYTCYLDKRLEYISGLVQQAENFKSENKVFKKVENECFKFLKKQNYTHKELDARVQSILGYPIFLERGFMDEKPTIIKGKTFKGNEALFADWFRYYKEYQNFQTFYDTENYPLVELEKKQADRKRKTKIYQQKKNDVFTLLMAKHIFKSVFKQDSIDQFSLEDLYQSREERLGNQERARQTGERNTNYIWNKTVDLKLCDGKITVENVKLKNVGDFIKYEYDQRVQAFLKYEENIEWQAFLIKESKEEENYPYVVEREIEQYEKVRREELLKEVHLIEEYILEKVKDKEILKKGDNQNFKYYILNGLLKQLKNEDVESYKVFNLNTEPEDVNINQLKQEATDLEQKAFVLTYIRNKFAHNQLPKKEFWDYCQEKYGKIEKEKTYAEYFAEVFKKEKEALIK

SEQ ID NO: 692 - protein, 1095 aa, Unknown; identical to SEQ ID NO: 687
  source: /note="Description of Unknown: Cas13 sequence"

SEQ ID NO: 693 - protein, 1174 aa, Unknown
  source: /note="Description of Unknown: Cas13 sequence"
MTEQSERPYNGTYYTLEDKHFWAAFLNLARHNAYITLTHIDRQLAYSKADITNDQDVLSFKALWKNLDNDLERKSRLRSLILKHFSFLEGAAYGKKLFESKSSGNKSSKNKELTKKEKEELQANALSLDNLKSILFDFLQKLKDFRNYYSHYRHSGSSELPLFDGNMLQRLYNVFDVSVQRVKRDHEHNDKVDPHYHFNHLVRKGKKDRYGHNDNPSFKHHFVDSEGMVTEAGLLFFVSLFLEKRDAIWMQKKIRGFKGGTGPYEQMTNEVFCRSRISLPKLKLESLRTDDWMLLDMLNELVRCPKPLYDRLREKDRACFRVPVDILPDEDDTDGGGEDPFKNTLVRHQDRFPYFALRYFDLKKVFTSLRFHIDLGTYHFAIYKKMIGEQPEDRHLTRNLYGFGRIQDFAEEHRPEEWKRLVRDLDYLETGDKPYISQTTPHYHIEKGKIGLRFVPEGQHLWPSPEVGTTRTGRSKCAQDKRLTAEAFLSVHELMPMMFYYFLLREKYSEEVSAEKVQGRIKRVIEDVYAIYDAFARDEINTLKELDTCLADKGIRRGHLPKQMITILSQERKDMKEKIRKKLQEMIADTDHRLDMLDRQTDRKIRIGRKNAGLPKSGVIADWLVRDMMRFQPVAKDASGKPLNNSKANSTEYRMLQRALALFGGEKERLTPYFRQMNLTGGNNPHPFLHETRWESHTNILSFYRSYLRARKAFLERIGRSDRVENCPFLLLKEPKTDRQTLVAGWKDEFHLPRGIFTEAVRDCLIEMGYDEVGSYREVGFMAKAVPLYFERACEDRVQPFYDSPFNVGNSLKPKKGRFLSKEDRAEEWERGMERFRDLEAWSHSAARRIKDAFAGIEYASPGNKKKIEQLLRDLSLWEAFESKLKVRADKINLAKLKKEILEAQEHPYHDFKSWQKFERELRLVKNQDIITWMMCRDLMEENKVEGLDTGTLYLKDIRPNVQEQGSLNVLNRVKPMRLPVVVYRADSRGHVHKEAPLATVYIEERNTKLLKQGNFKSFVKDRRLNGLFSFVDTGGLAMEQYPISKLRVEYELAKYQTARVCVFELTLRLEESLLSRYPHLPDESFREMLESWSDPLLAKWPELHGKVRLLIAVRNAFSHNQYPMYDEAVFSSIRKYDPSSPDAIEERMGLNIAHRLSEEVKQAKETVERIIQA

SEQ ID NO: 694 - protein, 1103 aa, Unknown
  source: /note="Description of Unknown: Cas13 sequence"
MEKPLPPNVYTLKHKFFWGAFLNIARHNAFITICHINEQLGLTTPPNDDKIADVVCGTWNNILNNDHDLLKKSQLTELILKHFPFLAAMCYHPPKKEGKKKGSQKEQQKEKENEAQSQAEALNPSELIKALKTLVKQLRTLRNYYSHYKHKKPDAEKDIFKHLYKAFDASLRMVKEDYKAHFTVNLTQDFAHLNRKGKNKQDNPKFDRYRFEKDGFFTESGLLFFTNLFLDKRDAYWMLKKVSGFKASHKQSEKMTTEVFCRSRILLPKLRLESRYDHNQMLLDMLSELSRCPKLLYEKLSEKDKKHFQVEADGFLDEIEEEQNPFKDALIRHQDRFPYFALRYLDLNESFKSIRFQVDLGTYHYCIYDKKIGDEQEKRHLTRTLLSFGRLQDFTEINRPQEWKALTKDLDYKETSKQPFISKTTPHYHITDNKIGFRLGTSKELYPSLEVKDGANRIAKYPYNSDFVAHAFISVHELLPLMFYQHLTGKSEDLLKETVRHIQRIYKDFEEERINTIEDLEKANQGRLPLGAFPKQMLGLLQNKQPDLSEKAKIKIEKLIAETKLLSHRLNTKLKSSPKLGKRREKLIKTGDWLVKDFMRFQPVAYDVQNQPIESSKANSTEFQLIQRALALYGGEKNRLEGYFKQTNLIGNTNPHPFLNKFNWKACRNLVDFYQQYLEQREKFLEAIKNQPWEPYQYCLLLKIPKENRKNLVKGWEQGGISLPRGLFTEAIRETLSEDLTLSKPIRKEIKKHGRVGFISRAITLYFRERYQDDHQSFYNLPYELEAKASTPKPPLPKKREYVLRAEHYEYWQQNKPQSPTELQRLELHTSDRWKDYLLYKRWQHLEKKLRLYRNQDVMLWLMTLELTKNHFKELKLNYHQLKLENLAVNVQEADAKLNPLNQTLPMVLPVKVYPATAFGEVQYQETPIRTVYIREEQTKALKMGNFKALVKDRRLNGLFSFIKEENDTQKHPISQLRLRRELEIYQSLRVDAFKETLSLEEKLLNKHASLSSLENEFRTLLEEWKKKYAASSMVTDEHIAFIASVRNAFCHNQYPFYKETLHAPILLFTVAQPTTEEKDGLGIAEALLRVLREYCEIVKSQI

SEQ ID NO: 695 - protein, 1095 aa, Unknown; identical to SEQ ID NO: 687
  source: /note="Description of Unknown: Cas13 sequence"

SEQ ID NO: 696 - protein, 1224 aa, Unknown; identical to SEQ ID NO: 691
  source: /note="Description of Unknown: Cas13 sequence"

SEQ ID NO: 697 - protein, 948 aa, Unknown
  source: /note="Description of Unknown: Cas13 sequence"
MFFSFHNAQRVIFKHLYKAFDASLRMVKEDYKAHFTVNLTRDFAHLNRKGKNKQDNPDFNRYRFEKDGFFTESGLLFFTNLFLDKRDAYWMLKKVSGFKASHKQREKMTTEVFCRSRILLPKLRLESRYDHNQMLLDMLSELSRCPKLLYEKLSEENKKHFQVEADGFLDEIEEEQNPFKDTLIRHQDRFPYFALRYLDLNESFKSIRFQVDLGTYHYCIYDKKIGDEQEKRHLTRTLLSFGRLQDFTEINRPQEWKALTKDLDYKETSNQPFISKTTPHYHITDNKIGFRLGTSKELYPSLEIKDGANRIAKYPYNSGFVAHAFISVHELLPLMFYQHLTGKSEDLLKETVRHIQRIYKDFEEERINTIEDLEKANQGRLPLGAFPKQMLGLLQNKQPDLSEKAKIKIEKLIAETKLLSHRLNTKLKSSPKLGKRREKLIKTGVLADWLVKDFMRFQPVAYDAQNQPIKSSKANSTEFWFIRRALALYGGEKNRLEGYFKQTNLIGNTNPHPFLNKFNWKACRNLVDFYQQYLEQREKFLEAIKNQPWEPYQYCLLLKIPKENRKNLVKGWEQGGISLPRGLFTEAIRETLSEDLMLSKPIRKEIKKHGRVGFISRAITLYFKEKYQDKHQSFYNLSYKLEAKAPLLKREEHYEYWQQNKPQSPTESQRLELHTSDRWKDYLLYKRWQHLEKKLRLYRNQDVMLWLMTLELTKNHFKELNLNYHQLKLENLAVNVQEADAKLNPLNQTLPMVLPVKVYPATAFGEVQYHKTPIRTVYIREEHTKALKMGNFKALVKDRRLNGLFSFIKEENDTQKHPISQLRLRRELEIYQSLRVDAFKETLSLEEKLLNKHTSLSSLENEFRALLEEWKKEYAASSMVTDEHIAFIASVRNAFCHNQYPFYKEALHAPIPLFTVAQPTTEEKDGLGIAEALLKVLREYCEIVKSQI

SEQ ID NO: 698 - protein, 1095 aa, Unknown; identical to SEQ ID NO: 687
  source: /note="Description of Unknown: Cas13 sequence"

SEQ ID NO: 699 - protein, 1106 aa, Unknown
  source: /note="Description of Unknown: Cas13 sequence"
MEKPLPPNVYTLKHKFFWGAFLNIARHNAFITICHINEQLGLTTPPNDDKIADVVCGTWNNILNNDHDLLKKSQLTELILKHFPFLAAMCYHPPKKEGKKKGSQKEQQKEKENEAQSQAEALNPSELIKALKTLVKQLRTLRNYYSHYKHKKPDAEKDIFKHLYKAFDASLRMVKEDYKAHFTVNLTQDFAHLNRKGKNKQDNPKFDRYRFEKDGFFTESGLLFFTNLFLDKRDAYWMLKKVSGFKASHKQSEKMTTEVFCRSRILLPKLRLESRYDHNQMLLDMLSELSRCPKLLYEKLSEKDKKHFQVEADGFLDEIEEEQNPFKDALIRHQDRFPYFALRYLDLNESFKSIRFQVDLGTYHYCIYDKKIGDEQEKRHLTRTLLSFGRLQDFTEINRPQEWKALTKDLDYKETSKQPFISKTTPHYHITDNKIGFRLGTSKELYPSLEVKDGANRIAKYPYNSDFVAHAFISVHELLPLMFYQHLTGKSEDLLKETVRHIQRIYKDFEEERINTIEDLEKANQGRLPLGAFPKQMLGLLQNKQPDLSEKAKIKIEKLIAETKLLSHRLNTKLKSSPKLGKRREKLIKTGVLADWLVKDFMRFQPVAYDVQNQPIESSKANSTEFQLIQRALALYGGEKNRLEGYFKQTNLIGNTNPHPFLNKFNWKACRNLVDFYQQYLEQREKFLEAIKNQPWEPYQYCLLLKIPKENRKNLVKGWEQGGISLPRGLFTEAIRETLSEDLTLSKPIRKEIKKHGRVGFISRAITLYFRERYQDDHQSFYNLPYELEAKASTPKPPLPKKREYVLRAEHYEYWQQNKPQSPTELQRLELHTSDRWKDYLLYKRWQHLEKKLRLYRNQDVMLWLMTLELTKNHFKELKLNYHQLKLENLAVNVQEADAKLNPLNQTLPMVLPVKVYPATAFGEVQYQETPIRTVYIREEQTKALKMGNFKALVKDRRLNGLFSFIKEENDTQKHPISQLRLRRELEIYQSLRVDAFKETLSLEEKLLNKHASLSSLENEFRTLLEEWKKKYAASSMVTDEHIAFIASVRNAFCHNQYPFYKETLHAPILLFTVAQPTTEEKDGLGIAEALLRVLREYCEIVKSQI

SEQ ID NO: 700 - protein, 1095 aa, Unknown; identical to SEQ ID NO: 687
  source: /note="Description of Unknown: Cas13 sequence"

SEQ ID NO: 701 - protein, 1095 aa, Unknown; identical to SEQ ID NO: 687
  source: /note="Description of Unknown: Cas13 sequence"

SEQ ID NO: 702 - protein, 1095 aa, Unknown; identical to SEQ ID NO: 687
  source: /note="Description of Unknown: Cas13 sequence"

SEQ ID NO: 703 - protein, 948 aa, Unknown; identical to SEQ ID NO: 697
  source: /note="Description of Unknown: Cas13 sequence"

SEQ ID NO: 704 - protein, 1008 aa, Unknown; identical to SEQ ID NO: 60
  source: /note="Description of Unknown: Cas13 sequence"

SEQ ID NO: 705 - protein, 1175 aa, Unknown
  source: /note="Description of Unknown: Cas13 sequence"
MTEQNEKPYNGTYYTLEDKHFWAAFLNLARHNAYITLTHIDRQLAYSKADITNDEDILFFKGQWKNLDNDLERKARLRSLILKHFFFLEGAAYGKKLFESQSSGNKSSKKKELTKKEKEELQANALSLDNLKSILFDFLQKLKDFRNYYSHYRHPESSELPLFDGNMLQRLYNVFDVSVQRVKRDHEHNDKVDPHRHFNHLVRKGKKDKYGNNDNPFFKHHFVDREGKVTEAGLLFFVSLFLEKRDAIWMQKKIRGFKGGTETYQQMTNEVFCRSRISLPKLKLESLRTDDWMLLDMLNELVRCPKSLYDRLREEDRARFRVPVDILSDEDDTDGAEEDPFKNTLVRHQDRFPYFALRYFDLKKVFTSLRFHIDLGTYHFAIYKKNIGEQPEDRHLTRNLYGFGRIQDFAEEHRPEEWKRLVRDLDYFETGDKPYITQTTPHYHIEKGKIGLRFVPEGQHLWPSPEVGATRTGRSKYAQDKRFTAEAFLSVHELMPMMFYYFLLREKYSEEASAERVQGRIKRVIEDVYAVYDAFARDEINTRDELDACLADKGIRRGHLPRQMIAILSQKHKDMEEKVRKKLQEMIADTDHRLDMLDRQTDRKIRIGRKNAGLPKSGVIADWLVRDMMRFQPVAKDTSGKPLNNSKANSTEYRMLQRALALFGGEKERLTPYFRQMNLTGGNNPHPFLHETRWESHTNILSFYRSYLKARKAFLQSIGRSDRVENHRFLLLKEPKTDRQTLVAGWKGEFHLPRGIFTEAVRDCLIEMGLDEVRSYKEVGFMAKAVPLYFERASKDRVQPFYDYPFNVGNSLKPKKGRFLSKEKRAEEWESGKERFRDLEAWSHSAARRIEDAFAGIENASRENKKKIEQLLQDLSLWETFESKLKVKADKINIAKLKKEILEAKEHPYLDFKSWQKFERELRLVKNQDIITWMMCRDLMEENKVEGLDTGTLYLKDIRTDVQEQGSLNVLNHVKPMRLPVVVYRADSRGHVHKEQAPLATVYIEERDTKLLKQGNFKSFVKDRRLNGLFSFVDTGGLAMEQYPISKLRVEYELAKYQTARVCAFEQTLELEESLLTRYPHLPDKNFRKMLESWSDPLLAKWPELHEKVRLLIAVRNAFSHNQYPMYDEAVFSPIRKYDPSSPDAIEERMRLNIAHRLSEEVKQAKETVERIIQA

SEQ ID NO: 706 - protein, 1008 aa, Unknown; identical to SEQ ID NO: 60
  source: /note="Description of Unknown: Cas13 sequence"

SEQ ID NO: 707 - protein, 1003 aa, Unknown; identical to SEQ ID NO: 671
  source: /note="Description of Unknown: Cas13 sequence"

SEQ ID NO: 708 - protein, 1106 aa, Unknown; identical to SEQ ID NO: 699
  source: /note="Description of Unknown: Cas13 sequence"

SEQ ID NO: 709 - protein, 1095 aa, Unknown; identical to SEQ ID NO: 687
  source: /note="Description of Unknown: Cas13 sequence"

SEQ ID NO: 710 - protein, 1095 aa, Unknown; identical to SEQ ID NO: 687
  source: /note="Description of Unknown: Cas13 sequence"

SEQ ID NO: 711 - protein, 948 aa, Unknown; identical to SEQ ID NO: 697
  source: /note="Description of Unknown: Cas13 sequence"

SEQ ID NO: 712 - protein, 1095 aa, Unknown; identical to SEQ ID NO: 687
  source: /note="Description of Unknown: Cas13 sequence"

SEQ ID NO: 713 - protein, 1095 aa, Unknown; identical to SEQ ID NO: 687
  source: /note="Description of Unknown: Cas13 sequence"

SEQ ID NO: 714 - protein, 1095 aa, Unknown; identical to SEQ ID NO: 687
  source: /note="Description of Unknown: Cas13 sequence"

SEQ ID NO: 715 - protein, 1008 aa, Unknown; identical to SEQ ID NO: 60
  source: /note="Description of Unknown: Cas13 sequence"

SEQ ID NO: 716 - protein, 948 aa, Unknown; identical to SEQ ID NO: 697
  source: /note="Description of Unknown: Cas13 sequence"

SEQ ID NO: 717 - protein, 1095 aa, Unknown; identical to SEQ ID NO: 687
  source: /note="Description of Unknown: Cas13 sequence"

SEQ ID NO: 718 - protein, 1131 aa, Unknown
  source: /note="Description of Unknown: Cas13 sequence"
MTNTPKRRTLHRHPSYFGAFLNIARHNAFMIMEHLSTKYDMEDKNTLDEAQLPNAKLFGCLKKRYGKPDVTEGVSRDLRRYFPFLNYPLFLHLEKQQNAEQAATYDINPEDIEFTLKGFFRLLNQMRNNYSHYISNTDYGKFDKLPVQDIYEAAIFRLLDRGKHTKRFDVFESKHTRHLESNNSEYRPRSLANSPDHENTVAFVTCLFLERKYAFPFLSRLDCFRSTNDAAEGDPLIRKASHECYTMFCCRLPQPKLESSDILLDMVNELGRCPSALYNLLSEEDQARFHIKREEITGFEEDPDEELEQEIVLKRHSDRFPYFALRYFDDTEAFQTLRFDVYLGRWRTKPVYKKRIYGQERDRVLTQSIRTFTRLSRLLPIYENVKHDAVRQNEEDGKLVNPDVTSQFHKSWIQIESDDRAFLSDRIEHFSPHYNFGDQVIGLKFINPDRYAAIQNVFPKLPGEEKKDKDAKLVNETADAIISTHEIRSLFLYHYLSKKPISAGDERRFIQVDTETFIKQYIDTIKLFFEDIKSGELQPIADPPNYQKNEPLPYVRGDKEKTQEERAQYRERQKEIKERRKELNTLLQNRYGLSIQYIPSRLREYLLGYKKVPYEKLALQKLRAQRKEVKKRIKDIEKMRTPRVGEQATWLAEDIVFLTPPKMHTPERKTTKHPQKLNNDQFRIMQSSLAYFSVNKKAIKKFFQKETGIGLSNRETSHPFLYRIDVGRCRGILDFYTGYLKYKMDWLDDAIKKVDNRKHGKKEAKKYEKYLPSSIQHKTPLELDYTRLPVYLPRGLFKKAIVKALAAHADFQVEPEEDNVIFCLDQLLDGDTQDFYNWQRYYRSALTEKETDNQLVLAHPYAEQILGTIKTLEGKQKNNKLGNKAKQKIKDELIDLKRAKRRLLDREQYLRAVQAEDRALWLMIQERQKQKAEHEEIAFDQLDLKNITKILTESIDARLRIPDTKVDITDKLPLRRYGDLRRVAKDRRLVNLASYYHVAGLSEIPYDLVKKELEEYDRRRVAFFEHVYQFEKEVYDRYAAELRNENPKGESTYFSHWEYVAVAVKHSADTHFNELFKEKVMQLRNKFHHNEFPYFDWLLPEVEKASAALYADRVFDVAEGYYQKMRKLMRQ

SEQ ID NO: 719 - protein, 1131 aa, Unknown; identical to SEQ ID NO: 718
  source: /note="Description of Unknown: Cas13 sequence"

SEQ ID NO: 720 - protein, 1095 aa, Unknown; identical to SEQ ID NO: 687
  source: /note="Description of Unknown: Cas13 sequence"

SEQ ID NO: 721 - protein, 1095 aa, Unknown; identical to SEQ ID NO: 687
  source: /note="Description of Unknown: Cas13 sequence"

SEQ ID NO: 722 - protein, 1095 aa, Unknown; identical to SEQ ID NO: 687
  source: /note="Description of Unknown: Cas13 sequence"

SEQ ID NO: 723 - protein, 1115 aa, Unknown; identical to SEQ ID NO: 58
  source: /note="Description of Unknown: Cas13 sequence"

SEQ ID NO: 724 - protein, 1099 aa, Unknown
  source: /note="Description of Unknown: Cas13 sequence"
MEKPLPPNVYTLKHKFFWGAFLNIARHNAFITICHINEQLGLTTPPNDDKIADVVCGTWNNILNNDHDLLKKSQLTELILKHFPFLAAMCYHPPKKEGKKKGSQKEQQKEKEKEKENEAQSQAEALNPSELIKVLKTIVKQLRTLRNYYSHHSHKKPDTEKDIFKHLYKAFDASLRMVKEDYKAHFTVNLTRDFAHLNRKGKNKQDNPDFNRYRFEKDGFFTESGLLFFTNLFLDKRDAYWMLKKVSGFKASHKQREKMTTEVFCRSHILLPKLRLESRYDHNQMLLDMLSELSRCPKLLYEKLSEENKKHFQVEADGFLDEIEEEQNPFKDTLIRHQDRFPYFALRYLDLNESFKSIRFQVDLGTYHYCIYDKKIGDEQEKRHLTRTLLSFGRLQDFTEINRPQEWKALTKDLDYKETSNQPFISKTTPHYHITDNKIGFRLGTSKELYPSLEIKDGANRIAKYPYNSGFVAHAFISVHELLPLMFYQHLTGKSEDLLKETVRHIQRIYKDFEEERINTIEDLEKANQGRLPLGAFPKQMLGLLQNKQPDLSEKAKIKIEKLIAETKLLSHRLNTKLKSSPKLGKRREKLIKTGVLADWLVKDFMRFQPVAYDAQNQPIKSSKANSTEFWFIRRALALYGGEKNRLEGYFKQTNLIGNTNPHPFLNKFNWKACRNLVDFYQQYLEQREKFLEAIKNQPWEPYQYCLLLKIPKENRKNLVKGWEQGGISLPRGLFTEAIRETLSEDLMLSKPIRKEIKKHGRVGFISRAITLYFKEKYQDKHQSFYNLSYKLEAKAPLLKREEHYEYWQQNKPQSPTESQRLELHTSDRWKDYLLYKRWQHLEKKLRLYRNQDIMLWLMTLELTKNHFKELNLNYHQLKLENLAVNVQEADAKLNPLNQTLPMVLPVKVYPATAFGEVQYQETPIRTVYIREEHTKALKMGNFKALVKDRRLNGLFSFIKEENDTQKHPISQLRLRRELEIYQSLRVDAFKETLDLEEKLLKKHTSLSSLENKFRILLEEWKKEYAASSMVTDEHIAFIASVRNAFCHNQYPFYEEALHAPIPLFTVAQQTTEEKDGLGIAEALLRVLREYCEIVKSQI

SEQ ID NO: 725 - protein, 948 aa, Unknown; identical to SEQ ID NO: 697
  source: /note="Description of Unknown: Cas13 sequence"

SEQ ID NO: 726 - protein, 1099 aa, Unknown; identical to SEQ ID NO: 724
  source: /note="Description of Unknown: Cas13 sequence"

SEQ ID NO: 727 - protein, 1003 aa, Unknown; identical to SEQ ID NO: 651
  source: /note="Description of Unknown: Cas13 sequence"

SEQ ID NO: 728 - protein, 1095 aa, Unknown
  source: /note="Description of Unknown: Cas13 sequence"
MEKPLLPNVYTLKHKFFWGAFLNIARHNAFITICHINEQLGLKTPSNDDKIVDVVCETWNNILNNDHDLLKKSQLTELILKHFPFLTAMCYHPPKKEGKKKGHQKEQQKEKESEAQSQAEALNPSKLIEALEILVNQLHSLRNYYSHYKHKKPDAEKDIFKHLYKAFDASLRMVKEDYKAHFTVNLTRDFAHLNRKGKNKQDNPDFNRYRFEKDGFFTESGLLFFTNLFLDKRDAYWMLKKVSGFKASHKQREKMTTEVFCRSRILLPKLRLESRYDHNQMLLDMLSELSRCPKLLYEKLSEENKKHFQVEADGFLDEIEEEQNPFKDTLIRHQDRFPYFALRYLDLNESFKSIRFQVDLGTYHYCIYDKKIGDEQEKRHLTRTLLSFGRLQDFTEINRPQEWKALTKDLDYKETSNQPFISKTTPHYHITDNKIGFRLGTSKELYPSLEIKDGANRIAKYPYNSGFVAHAFISVHELLPLMFYQHLTGKSEDLLKETVRHIQRIYKDFEEERINTIEDLEKANQGRLPLGAFPKQMLGLLQNKQPDLSEKAKIKIEKLIAETKLLSHRLNTKLKSSPKLGKRREKLIKTGVLADWLVKDFMRFQPVAYDAQNQPIKSSKANSTEFWFIRRALALYGGEKNRLEGYFKQTNLIGNTNPHPFLNKFNWKACRNLVDFYQQYLEQREKFLEAIKNQPWEPYQYCLLLKIPKENRKNLVKDWEQGGISLPRGLFTEAIRETLSEDLMLSKPIRKEIKKHGRVGFISRAITLYFKEKYQDKHQSFYNLSYKLEAKAPLLKREEHYEYWQQNKPQSPTESQRLELHTSDRWKDYLLYKRWQHLEKKLRLYRNQDVMLWLMTLELTKNHFKELNLNYHQLKLENLAVNVQEADAKLNPLNQTLPMVLPVKVYPATAFGEVQYHKTPIRTVYIREEHTKALKMGNFKALVKDRRLNGLFSFIKEENDTQKHPISQLRLRRELEIYQSLRVDAFKETLSLEEKLLNKHTSLSSLENEFRALLEEWKKEYAASSMVTDEHIAFIASVRNAFCHNQYPFYKEALHAPIPLFTVAQPTTEEKDGLGIAEALLKVLREYCEIVKSQI

SEQ ID NO: 729 - protein, 1106 aa, Unknown; identical to SEQ ID NO: 699
  source: /note="Description of Unknown: Cas13 sequence"

SEQ ID NO: 730 - protein, 1095 aa, Unknown; identical to SEQ ID NO: 687
  source: /note="Description of Unknown: Cas13 sequence"

SEQ ID NO: 731 - protein, 1095 aa, Unknown; identical to SEQ ID NO: 687
  source: /note="Description of Unknown: Cas13 sequence"

SEQ ID NO: 732 - protein, 1335 aa, Unknown
  source: /note="Description of Unknown: Cas12a sequence"
MKSLAQFQNLYALQKTLRFELKPEGHTRETFNRWLEEIEKEQASENENIVYQDLLRAKKYEKIKIILDEYHKDFIEQALAYANLTELEKYEELYRKSNRTSEEEEEFENTKESLRKQIANIFIKNPNKTVQERWKFLFSKKLIQNELIVWVKGNYELLSEKLKNEFPDESSIISTIEDFKYFTTYFRNYHENRKNLYSNEDKFSTIAHRLIHENLPKFIDNIAIYQKAKAVLNINEVEKELGLPEDTLDKIFSLDFFSKALTQKGIDQYNYFLGGKTENEVKKIKGLNEFINLYNQQQQDKNQRLPFLKVLYKLPLFERTSTSFRFEPIENDRDLIERIGKFYYNDLKQYRDDSQGDTTDILSGINTLLRHVHDYRDGLYVNGGITLTQISQKIFGSWSYINNALAYFYDTYIDASGVDHQGERKPKKQKQIQEKTKWLKQKQFPVILVEKALSEYKSIETNEDLKTRISDTTLCDFFKRCGNDDNGQDLFDRIEARLREKNEEGYSLEDLLKKEFTTERKLMQDKTKTLLIKNFLDVIQGDKDDITAGLLHFVKCLIPRTEISEKNELFYSGMEKYLNILSEVTPLYNKARNYLTQKPYSIEKVKLNFENSTLLDGWDENEESDNSCVLLRKRGYYYLGIMNKKHNMIFDRKIYPKATEGEAYYEKMIYKLLPGAYKMLPKVFFSEKNIDYFKPSEEILRIRNTASYSKNGQPQEGYQKASFSIEDCRKYIDFFKKCIANHWDWQKFNFNFSPTEYYQSIDEFYREIERQGYKIDFVKIPESYINQLIKENKLYLFKIYNKDFSEKKKSKGKDNLHTLYWKMLFDEKNLKDVVLKLNGEAEVFFRQKSILYNEEIWNKGHHYSELKDRFSYPIISNKRYAEDKFFLHVPITLNFKADGINNVNNMVNEFIKDNRDIHIIGIDRGERHLLYVSVINQKGDIVEQCSLNEIVTEYNGKIFKKNYHEELDNLEKERDRARKDWQTIANIKELKEGYLSHVIHKISKLILKYNAIVVMEDLNSGFKRGRQKVEKQVYQNFEKQLIEKLNYLVLKESNVDEPGGVLRAYQLANKFETFKKLGKQSGIIFYVPAAYTSAIDPVTGYIQYLYPLKQADSVEKARKFYSQFKRISYNPHKQWFEFSFDYNDFNIIYHGKSSWTICTTNTERYMWNRLLNNGHGGEELVYVTNELELLFGEYNIIYGDGKDIKQQITDVQDIDVDRTAKQFYKRINELLNLTLKLRHNNGKKGADEEDYILSPVEPYFDSRFESRKPSMQQTLPINADANGAFNIARKGLLLLERLNQLGVEEFEKTKKSNNKKTQWLPHELWVEYAQNHTRK

SEQ ID NO: 733 - protein, 1273 aa, Unknown
  source: /note="Description of Unknown: Cas12a sequence"
MQDKTGWSSFTNKYSLSKTLRFELKPVGNTQKMLEDDGVFQKDRERQENYKKVKPFMDKLHREFIKEALNNLKLEGLTEYFEIFKKFRKDKNNKELKNAEKKLRQIIGRCYTETAQIWVEKYKEFGFKKKNIGFLFEEGVFELMKLKYGNDEASQIEKNGEVLSIFDGWKGFLGYFKKFFETRNNFYKDDGTSTAVSTRIINENLKIYLDNLIKYNKIKDKVDFKEADILQENKLNLSDFFNVESYAKYSLQKGIDYYNEILGGKTLKNGTKLKGLNEVINEYKQKNKSGELSKFKMLKKQILGEGEDRTLFEEIENEDELKDVLKDFFYNADPKITLFKTLLEDFFSNTEKYKDELDKIYFNTVAINGILHRWVDDSGVFQKYLFEVLKSNKLVKSNHYDKKEDSYKFPDFISFEHIKVALENCERDGLKDKFWKEKYYTKECLTENGLANLWQEFLEIYKCEFKKLYDYKTDDNDCYLQYRDNYKKYILDANFNPKEKSAKDIIKDYLDSVLSIYQLAKYFALEKKKVWTTDYETGDFYYEYIKFYEDTYEQIIKPYNLVRNYLTRKPINTAKKWKLNFDNAYLASGWDKDKEVSNLTVILRRDEQYYLAIMKKGKNKIFEKKFSCGEFEKMEYKQIAEASSDIHNLVLMNDGSCRRCIKMHDKRKYWPLDISIIKEKKSYAKENFVRRDFERFVNYMKKCSLLYWKEYDLKFSDTSTYKNINDFTNEIASQGYKLSFSAIPESYINEKNNNGELYLFQIYNKDFGIKTEGNKNLHTMYWESIFSEENRFRNFIVKLNGKAEIFYRPKSEQVEKEQRNFTREIIKNRRYTENKIYFHCPITLNRISRENVKKFNNGINNYIATNPNINILGVDRGEKHLVYYAIVDQDGKLIDAEDATGSFNTIGSTDYHRLLEEKAKDREKERKDWDLIRGIKDLKKGYISLVVRKIADLAIKYNAIIIFEDLNTRFKQIRGGMEKSVYQQLEKALINKLSFLVNKGEKDPEQAGHLLKAYQLAAPFQTFDKMGRQTGIIFYTQASYTSKIDPITGWRPNLYLKYRNIDDSKESIKKFKSILFNKEKNRFEFTYDLKDFVDFEEDKIPEKTEWTLCSSVERHKWNRHMNNNKGGYEVYKDLTENFYKLFDENNISMNKDIVDQVESISNGNFFRQFIYLFNLVCQIRNTDEKAEDVDKRDFILSPVEPFFDSRRAKDFKAYGDNLPKNGDENGAYNIARKGVLIIKKIKEYYNQNGSCDKLGWGDLSISHKEWDDFATNN

SEQ ID NO: 734 - protein, 1301 aa, Unknown; identical to SEQ ID NO: 11
  source: /note="Description of Unknown: Cas12a sequence"

SEQ ID NO: 735 - protein, 1188 aa, Unknown
  source: /note="Description of Unknown: Cas12b sequence"
MCVSRLPWFNITLTGKLNRQRLNQMCVSRLPWFCTPKGQLAATPKTVVAQQENAMLAIIRDVHEAAPADLKTVAQRLEPGYFVTQFPKQQMTGDEARAEAERLFAACQKKFKELAEYEDGYRQCLDALGPNLSLPRLGRKPKGAYPYAVVFKLMPTNATWECFKRVTASLYKRAQKGVVSPVSADSIADVRTNDEPLFEYFTNLALVRPPGNKDRAVWFEFDLAAFIEAIKSPHQFFQDTIKREQAVAQIKAKLDAMDGQGRAASGEEDALPGFEGDDRITLLRELVTDTLGYLAEADASTSPGGKIEYSIQERTVRGFAEVKRRWRDLVEKGKATEDALLKVLAEEQTEHRDDFGSATLYRELAKPKFQPIWRDPGTQPWHADDPLRAWLEYRELGRELEDKQRPIRFTPVHPVHSPRFFIFPKKKGGGRFGTVHEPGQLRVMAGIVAQTQHGWEPVPVRITYAAPRLRRDQLRDDVETDLESRPWLQPMMQALGLPEPDTADFSNCRVTLQPSAPDDIQLTFPVDVSADKLTTAIGKAARWAKQFNLFPDGDNFYNASLRWPHEKKPSKPPVPWHEALDNFSVLAADLGQRCAGAFARLEVRANDDFAGKPSRFIGETPGKKWRAALVAAGMLRLPGEEQTVWRPGATGPNFHTELSGSRGRMARPHEADDTADLLRAFDCPEESLMPADWRTSLSFPEQNDKLLVAARRYQSRLARLHRWCWFLTDEKKRQTALDEIREAEDMPAADDPQLTDKLRALLLQKQAALPGLLVRLANRILPLRGRSWQWETHPDKADCHLLTQTGPALPDVWIRGQRGLSMQRIEQIEELRRRFQSLNQMQRREIGGKPPIRRDDSIPDCCPDLLDKLDQIKEQRANQAAHMILAEALGLRLAPPPADKRQLRASRDVHGQYVKSREPVDFIVIEDLSRYRSSQGRAPRENSRLMKWCHRAVRDKLRELCEPFGIPVVETPAAYSSRFCSRSGVAGFRAVEVGPGFDREFPWMMLKDREDEGEPVRQLILQVATLNQGRDGKPPRTLLAPLAGGPIFVPIVDKLNGADIQPALAQADINAAINLGLRAIADPRLWSIHPRCRTQRQGDQMLTREKRKFGETGQPLAVHRADGVKPDDTRNPNFFADISGSLPAWESATLDGQHLLSGRCLRSEIKKRQWQRCAEINDRRMNRWMKGE

SEQ ID NO: 736 - protein, 1518 aa, Unknown
  source: /note="Description of Unknown: Cas12b sequence"
MTELQTQRAYTLRLKGIDEKDQSWRDALWKTHEAVNKGAKVFGDWLLTLRGGLDHTLADAEIPGEKGKPDRAPTQEERKHRRILLALSWLSVESERGAPEEFIVATGKEPAATRNDKVIAALKDILRGRNLTEEKISEWTEVCTPSLSAAIREDAVWVNRSRAFDEAVKRIGSSLTREEVWDMLECFFGSRNAYLAPVKISEDESSDGEQEEKAKDLVQKAGQWLSSRFGTGEGADFAKMAAVYAKIAAWAGNAQAGTTGNEVINNLATALREFTPKSNDLKGVLDLISGPGYKSATRNLLKQIANTKTVTREDISKLQETAGEDSEECATKTGSKGKRAYADAILKDVESVCGFTYRIDKDGQPVSVADYSKYDEDYKWGSSRHKEFAVMLDHAARRVSLAHTWIKRAEAERRKFEEDSKKIMQVPQAAKDWLDAYCAQRSEASGALEPYRIRKRAIQGWKEIIASWNKPDCKTAEDRIAAARQLQDDPEIEKFGDIQLFEALAEDDAQCVWKKEDGTLDPEILINYTLASEAMFKKQHFKVPSYRHPDAFLYPVFCDFGNSRWELDFSIREAATKLKEIEAKIEKQRQEVHKVQQALEKCENDEKRPKMEERLKEAQKKLQESQNYGEYLHSNNKITMVLFDGTFVKKHIFAWQSKRLTKDLALYQEPSADPKNVVSRADRLGRAVASVGINDAVKVAGLFEQENWNGRLQAPRQQLEAIAQYVEKHGWDNKAEKMRASIKWFITFSAKLQSKGPWNEFARKHGLKEDPHYWPHAEKNENRTAHSRLILSRLPGLRVLSVDLGHRYAAACAVWEALGSEAFKKDIEGKRIIRGDTDENALYCHTEHEANGKKHITIYRRIGADTLPDGAHHPAPWARLDRQFLIKLQGEDEQAREASNEEIWKVHQLENTLGRRTPLIDRLIAGGWGYTEKQKARLEVLTNLGWCPTNKTDNQEEGDEEETAILSKPSLLVDDLMFSAVRTLRLALKRHGDRARIAHYLITDEKTKPGGVKEKLDKNGRVELLLDALGLWHDLFSSPGWHDEKAKQLWNAYIAGLLPEGELQQAKSVTTSAALGGQQKKEKKEKLRAVAEALYLNSDLCHSLNEVWRKRWEEDDKQWRIYIRWFKDWIMPRGANAKSPAIRHVGGLSLTRLATLTEFRRKVQVGFFTRLHPDGTKTETREDFGQKTLDTLEHLREQRVKQLASRIVEAALGIGSEDKRHWDGKKRPRQRIADPRFVPCHAVVIENLTHYRPEETRTRRENRQIMEWASSKVKKYLSEICQLHGLHLREVSAAYTSHQDSRTGAPGIRCQDVSLIEFMKSPFWRKQVAQAEKKQKEGKGDAVERYLCELNQKWKGASEEEWRKAGFVRIPLRGGEIFVSAAGHDSPAAKGIHADLNAAANIGLRALLDPDWSGKWWYVPCNSSTMCPARDKVTGSAAVNPGQPLQVSAQLESDDAAKDTKKRKKKGDGKSKEIINLWRDISSYPLEDTRGGTWSNKTVYWNRVQSNVVHILQNQMKG

SEQ ID NO: 737 - protein, 1374 aa, Unknown
  source: /note="Description of Unknown: Cas12b sequence"
MPETTQRAYTLRLQGHDPKDASWREALWKTHEAVNRGAKAFGDWLLTLRGGLDHSLADEGAPGQTPTEEQRKQRRILLALSWLSVESENGAPQEYIVPHDRDNESGARQNWKTREALREILKNRGCRDDEIESWCHDCEPSLTSAIRKDAVWVNRSKAFDNAVQSIPNFSREEIWDLLGCFFVSSQAYLAPLESPKDDKPDASKKDSSKDLIQSAGQWLSRRFGRGKGLNFARLAETYEAIARWASVANPGDTNDLIADLAKTLNAETPELDGILKVVSGPGHKSKTRNLLRSLSAVNHITKDTLQRLKDTANEDAKKAKLKKGEKGHRAYAYKVLEAVEDACGFTYLQEGDRAKHCEFAVMLDHAARRVSSLHTWIKRAEAERRRFEIDTKKKDQLPPSVKEWLDTYCQKRSKETGAVEPYRIRRGAIEGWKEIVEAWSKAGTTTAEDRKHEARRLPDNPHIDKSGDIKLFEDLALEDALPVWHANGDPNNPPDPQLLIDYVEGSEAEFKKRAFKVPTYCHPDPLVHPVFCDYGCSRWNVSFAIQPVKKQKLSSEEKLPAKGLLLDLLHGTAIRPVALRWQSKRFARDLALNTTDSSDKPNEVTRADRFGCALAKCPSSQKIRIRGLFEEKYWNGRLQAPRPELTALAKRVAKYGWDKKARKLRNSLNWFITFSANLRPSGPWEEYTKYAEKAFSSNASAKPSVSRGGFWVVHASPNKRGKMAQLRLCRLPELRVLSVDLGHRYAAACAVWETLSKSAFEQEIHERKILRGGTGPNDLFCHTQHDTNGQSKVTIYRRIGADTLPNGTPHPAPWARLDRQFLIKLPGEEREARKASPTELANVEKLEKELGLKTSENRVKRIDDLMSDTLRTVRQALRRHSLRARIAFNLATLRDQSDGDEESQSKQKRDTRWNNTVKIWHSLLESNEWTDDWAKALWDELGPLSDPQKADDAEWLKLAAEKFYTRWQEDEQTWRERLRWLRRWILPRGSQAASQKGSIRHVGGLSLTRLATIKTLYQVLKAYHMRLKPDNSRKNIPAEGDEALQNFGQKILDDLEHMREQRVKQLASRIVEAALGLGRMKQVTIGKDPKRPREPVDQSCHAVVIENLTHYRPEKRQTRRENRQLMDWSAAKVKKYLKECCQLHGLHLVEVSASYTSRQDSRTGAPGIRCQEVPLTDFLKKNFWREQVKQAKQRLSEGKANARDRYLCQLNERWGNAPAPVTQTAIRLRIPLNGGELFVSADQNSPASKGIQADLNAAANIGLRAITDPDWPGAWWYVPCEANTFKPVKDKVAGSAAIDSNVSLKKDSPNSEKPASDRKSRTSKSMINLWCDTSSKSLSEKDQWQESAPYWEDVAARTINILQASLACSTTNSQ

SEQ ID NO: 738 - protein, 1335 aa, Unknown; identical to SEQ ID NO: 732
  source: /note="Description of Unknown: Cas12a sequence"

SEQ ID NO: 739 - protein, 1520 aa, Unknown
  source: /note="Description of Unknown: Cas12b sequence"
MAYQNGKEQPTVTNQRAYTLRLSGTNDQDSIWRNRLWHTHEAVNKGAKTFGDWLLTMRGGLCHTLAEADVPGKGNKPARHPTPQEIRSRRVVLALSWLSVESQHGAPERHLVSHDLDIATGERKNWKTVEALREILHGRCLCKELIDEWANDCRDSLSATIREDAVWVNRSKAFDLAAKKIGASLTREELWDFLQPFFANKHGYLQMDTVAGVTNGDSETDAEEAKEDSSEEKAKDLSQKAGQWLSSRFGTGTGADFSRFSKVYEVLAARCGSVAVGVSGVEAIRILAGTLADFSPGSNDIEGMLGLMSGPGYKSATRNILQKINTLQTVSQQDLDRLREASEKDALQSKQKVGGKGSRPYANAILQDVEAACGICYAGTGESPARHWQYAVILDHAARRVSMAHSWIKRAEEQRSKFEIEKDKLDHVPKDALAWLDAFCARRSSESGASDAYRIRRSAVDGWKQVVAAWAALPPKPENQGSELLSDAESARIQAARELQDTVEKFGDIQLFEALSLTGAKCVWQPDGRPDAQPLLDYVAGTDAISKKQRFKVPAYRHPDALLHPVFCDFGNSRWNINYAIHRAPEKLTPAQQLLEKKKAEIDKAELTLAKAGDAAKQANISEKINGLRAAFIQQQEKVAWLNSRHAMTMSLWDGTHIEDTPLIWQSKRFGSDIGQPVEAQPLPVSRADRFGRAVALAQDNVPVIPSGLFDLSDWNGRLQAPRRQLEAIAAIRDSAKLSVNEKQQLVAKRIQSIRWLLTFSAKLQSHGPFIAYAAQHGFDWRYGAHGPENKSRQGLAKLILCRLPGLRILSVDLGHRYAAACAVWETLNAGQIQKACLDAGKEAPGPCTLYLHLKQIANGKEKKTIFRRIAADTLPDGSPHPAPWARLDRQFLIKLQGEDRDARLATSEEIAAVEQMENELGVVRQLKRKGRELLVDELMSDALRTLRLGLRRHGVRARIAFNLTANKRIRPGGKEEVLDQEGRVLLLTETLLAWYELYTAERWTDEPARELWNRHIQPLLGATILQNTVNQEDTPSAAKRRKLREETSGKLKHVAEEIAKNDSLCRQLHVLWSAQWQTEDVIWRTRLRMMRRWLLPRGVKRNAQLRISIRDVGGLSLTRIASFKSLYQVQKAYQMRPHPEDPRLNIPERGDSRLENFGQRVLDAMERMRENRVKQLASRIAEAALGIGGETGISSKDGSQKKRPTERSSDPRFAPCHAVVIEDLTHYRPDETQTRRENRQLMSWSSSKVKKYLGEACELNGLYLREVSPAYTSRQDSRTGAPGLRCNDVTVVEFNNSPFWRKQVGAAEKNQKEGNKGDARERYLLSIEEGIRGAANDRDIFRIPVKGGEIFVSACITDGGNNAKKNAPPGLQADLNAAANIGLRAIFDPDWEGRWWYIPCDAATLCPDAKKFIGCKAVDPTKPLRVVAEEGAISASGIGSKKSGRKKNAATDGTRIVNLWRDPSGAPIHRDVLRSPEWQDYAGYWNEVQHRVIRNLKTCYEQTSQQEDPFVSQDADKPF

SEQ ID NO: 740 - protein, 1180 aa, Unknown
  source: /note="Description of Unknown: Cas12b sequence"
MKRLAETALADKVKCETNSRPKGERAYANSILHDVESACGFTYRVDKGEQPVPVSDYSHYANDYRWGPANHSEFAVMLDHAARRVSLAHTWIKRAEAERRQFEENAKKIDKVPKVAREWLDSLCAERSIVLGALEPYRIRRRAVDGWKHVVAAWSKSDCKTAQDRITAARLLQEDPEIDKFGDIQLFEALAEDHAVCVWQRDGEAGKTSDPQLLIDYALAAEAEFKKRHFKVPAYRHPEAFWHPVFCDFGQSRWKICFDVHKNRQSRRQRACANRISRKICFDVHKKRQTLRLSLEVWTGSKMLDMPLCWQCKRLARDLALGQDHKKDRSCQVTRADRLGRAVSNVARNQEVQILGLFEQEYWNGRLQAPRPQLEALGRYIEKHGWDAKAQKSCRAIRWMISFSPRLQPAGPWGKFAEKLQLNPNPKYWPHAEDNKDRGSRSKLILCRLPGLRVLSVDLGHRYAAACAVWEAVDAEQVKEACQAAGHREPNENDLYLHLKKRTTKQKKGSQGVVEETTIYRRIGADTLPDCTPHPAPWARLDRQFLIRLQGEEDEARAASNEEVWAVHKLEAELGRTIPLIDRLLGAGWGQTEKQKARLKALRELGWTPANKCQAFNSTDETELRRPSLAVDELMLDAVGTLRLALKRHGDRARIARYLITDERTKPGGVKEKLDENGRIELLQDALIIWHGLFSSPRWRDDAAKQLWNEHIAKLVGEQNLVEVSEDASGSERRTKQKQNREKLREAAKALVDDVALRQALHDMWKRRWEEEDREWRRRLRWFKDWVLPRREQARKAYSRPAETGSSSHPKRRARYAAIRRVGGLSLTRLATLTEFRRKVQVGFFTRLKPDGTKAEAKEGFGQSTLDALEHLRAQRVKQLASRIVEAALGVGRIRRFPGVKNPKRPDTPVDKPCHAIVIENLTHYRPEETRTRRENRQLMTWSSSKIKKYLAEACQLYGLHLREVTAAYTSRQDSRTGAPGLRCQDVPVKEFMRSLFWRKEVAQAEKKLTAGKGSSYERLLCELNQRWKDNSPGDGKRAELLRLPHKGGEIFVSAAPDSPAARGLQADLNAAANIGLRALTDPDWPGKWWHVPCNAVTFRPVEDKVKGSAAVKLDQSLRQVAHPQSKDPGAKKSKEIVNLWCDISSLPLEHREWKLDWEPYPAYWNNVQCRVIRVLQGKV

SEQ ID NO: 741 - protein, 1546 aa, Unknown
  source: /note="Description of Unknown: Cas12b sequence"
MANAKVKTTTRSYTLSLNAPSDTTDRSPLWHRIFRTHYAICCGAREFGKLLLDLRGGLPTSLAQLGEGIAENDRRQTQRGTRRILALGWLSVEDLDHARNDPHRVQDTAPGSPLDQDLAEKILRKILITKGIKSEEEQSNWISDCLPALTANIRPDAVWVNRAESFAQWQRGTQPGAQPPTPEEAQQILFSLCGESLVTLTLPEQPAAAGQKQPDQETSPDPEEQTDRPPAAPSADDEMDPSNASRGIFGDLFGENAEGKRSRSQGKDNFACAVRDFLCANPTPSADAITEFREKQKPREPNPPGPEKYPPEVSTSGAPTAVAKRYRKLLVCAGLWPKSADEDGSSRNSAKTKFADPKEPQKTEIQINALDLIDACNQAAPADDSGTSPKAGRVFAPAWASNIAEKVASATQMPANAKSLNEFKRLMFALAARRFSQTQSWTRRNEAERHMAAARQDAAVARLREIDPDHKAQDWLRGYEQRRADQSGSNGEFRITRRMIGEAEAVFKAWAGTNSAAERELKTVAVQTTAEKFGDAALYSEIARNTAAEAVWRSGSAPEILDQWVKLRKAQSDQQRTRVPRFCHPNAFRHPTWCEFGESSKPGVWYAWNPKSKPRKPEVGGEGDGTRRLWVLLPDFNSGIGQAVPLRWRSKRLSKDLGEALQPSDAPIPRADRVSIAAAGLNLEGANGVPARYRPSLPFSENTKGWNARLQANRTALLHLESKWDAEAATWRDGGRSLLALKWFTTFSPELAMSEGPGRAIHPKLGWNSEPHSDLNRAQKRGGNAKLILSRLPGLRVLSVDLGHRYAAACAVWETLTTEQMNAACQAKNHTQPAESDMYVHLAHPTERVVKSGRKKGQNLIQTTVYRRIAADTLPDGTPHPAPWGRLDRQFLIKLQGEQRPTRAASKNEADLANALFHRLGLRSDADSENKSRAVDKLMARTVRVATLGLKRHARRAKIAYALDPNTKAIPGMGGSSAAFTPGDEPHIHLLTDALFDWQSLATDAKWDDAHARSLWNHHIATLPGGFHLENPTPRDESAHEPSRQRQRSGDDALRATLKPIAEKLSKADRQEVHAAWKKYWGDSDGQSAIVPKVLQGQRGPEKTTPSASASGWHGKIRWITDWIMGKYLEGCTGHAWKHDVGGLSVSRITTMKSLYQLHKAFAMRATPEKPRGAPEKGESNLGAAQGILTAMESMRQQRVKQLASRIAEAALGAGIERRSDNGRELQRPRERVDDPRFAACHAVVVEDLTNYRPDEMQTRRENRQLMQWASSKVKKYLSEACQLHGLYLRGVPAGYTSRQDSRTGAPGVRCGDIPVEELMAAPRWRRQILTAEKTRRENNTGTARDRYILTLDEKYRLLTAEQRKKTPPARIPVKGGDLFVSADPDSPAASGIQADLNAAANIGLKALIDPDWPGRWWYIPCDATTHKPSPERTRGSAAVDCDVPLGPDSTGTPEDRDAKPKKNQRNSKIAGRGQSAIINLWRDPTHLPIKENPSAWCESKKYWNQVEHNVVKVIESKGQKLTQTAEAATGESASSPPIAPTDVPW

SEQ ID NO: 742 - DNA, 112 bp, Artificial Sequence
  source: /note="Description of Artificial Sequence: Synthetic polynucleotide"
gtctagaggacagaatttttcaacgggtgtgccaatggccactttccaggtggcaaagcccgttgagcttctcaaatctgagaagtggcacagtggaggagtgtcttttcaa

SEQ ID NO: 743 - RNA, 45 nt, Artificial Sequence
  source: /note="Description of Artificial Sequence: Synthetic oligonucleotide"
aauuucuacuauuguagaucuccugcuagaauggcuggcaauggc

SEQ ID NO: 744 - DNA, 18 bp, Artificial Sequence
  source: /note="Description of Artificial Sequence: Synthetic primer"
gcttctacgcagaaggga

SEQ ID NO: 745 - DNA, 18 bp, Artificial Sequence
  source: /note="Description of Artificial Sequence: Synthetic primer"
gtgacagtttggccttgt

SEQ ID NO: 746 - DNA, 42 bp, Artificial Sequence; identical to SEQ ID NO: 419
  source: /note="Description of Artificial Sequence: Synthetic primer"

SEQ ID NO: 747 - DNA, 38 bp, Artificial Sequence; identical to SEQ ID NO: 81
  source: /note="Description of Artificial Sequence: Synthetic primer"

SEQ ID NO: 748 - DNA, 21 bp, Artificial Sequence
  source: /note="Description of Artificial Sequence: Synthetic primer"
cttgaactgttgcgactacgt

SEQ ID NO: 749 - DNA, 22 bp, Artificial Sequence
  source: /note="Description of Artificial Sequence: Synthetic primer"
attgaaccagcttgagagcaaa

SEQ ID NO: 750 - DNA, 17 bp, Artificial Sequence
  source: /note="Description of Artificial Sequence: Synthetic primer"
ttgatgagctggagcca

SEQ ID NO: 751 - DNA, 18 bp, Artificial Sequence
  source: /note="Description of Artificial Sequence: Synthetic primer"
caccctcaatgcagagtc

SEQ ID NO: 752 - DNA, 41 bp, Artificial Sequence; identical to SEQ ID NO: 87
  source: /note="Description of Artificial Sequence: Synthetic primer"

SEQ ID NO: 753 - DNA, 45 bp, Artificial Sequence; identical to SEQ ID NO: 88
  source: /note="Description of Artificial Sequence: Synthetic primer"

SEQ ID NO: 754 - DNA, 20 bp, Artificial Sequence
  source: /note="Description of Artificial Sequence: Synthetic primer"
atgtggatggctgagttgtt

SEQ ID NO: 755 - DNA, 22 bp, Artificial Sequence
  source: /note="Description of Artificial Sequence: Synthetic primer"
ggcatgctgagtactggacctc

SEQ ID NO: 756 - DNA, 7 bp, Artificial Sequence
  source: /note="Description of Artificial Sequence: Synthetic oligonucleotide"
ccccccc

SEQ ID NO: 757 - DNA, 7 bp, Artificial Sequence
  source: /note="Description of Artificial Sequence: Synthetic oligonucleotide"
ttttttt

SEQ ID NO: 758 - DNA, 28 bp, Artificial Sequence
  source: /note="Description of Artificial Sequence: Synthetic oligonucleotide"
caatttgcccccagcgcttcagcgttct

SEQ ID NO: 759 - DNA, 28 bp, Artificial Sequence
  source: /note="Description of Artificial Sequence: Synthetic oligonucleotide"
aaagtgtgcttttccatcatgacaaatg

SEQ ID NO: 760 - DNA, 28 bp, Artificial Sequence
  source: /note="Description of Artificial Sequence: Synthetic oligonucleotide"
gtgtgcttttccatcatgacaaatggca

1. A composition comprising
(i) a guide polynucleotide having a nucleotide sequence comprising a crRNA selected from the group consisting of: SEQ ID NO.: 77; SEQ ID NO.: 84; SEQ ID NO.: 91; and
(ii) a CRISPR/Cas enzyme.

2. The composition of claim 1, wherein the CRISPR/Cas enzyme is a Type V CRISPR/Cas enzyme.

3. The composition of claim 1, wherein the CRISPR/Cas enzyme is a Type VI CRISPR/Cas enzyme.

4. The composition of claim 1, wherein the CRISPR/Cas enzyme is a thermostable CRISPR/Cas enzyme.

5. The composition of claim 1, wherein the CRISPR/Cas enzyme is a Cas13 CRISPR/Cas enzyme.

6. A composition comprising:
a reverse transcriptase;
a DNA polymerase;
nucleotides;
RNA;
a primer set selected from the group consisting of:
(a):
orf1ab-F3
(SEQ ID NO. 72)
TGAAAATAGGACCTGAGCG
orf1ab-B3
(SEQ ID NO. 73)
ACACCTAGTCATGATTGCA
orf1ab-FIP
(SEQ ID NO. 74)
CCAATAGAATGATGCCAACAGGCGATAGACGTGCCACATGC
orf1ab-BIP
(SEQ ID NO. 75)
GATTGATGTTCAACAATGGGGTTTCATTACCATGGACTTGACAAT
orf1ab-LF-T7
(SEQ ID NO. 76)
gaaatTAATACGACTCACTATAGGGAAGTGTCTGAAGCAGTGGAAAA;
(b):
N-5F3
(SEQ ID NO. 78)
GCTTCTACGCAGAAGGGA
N-5B3
(SEQ ID NO. 79)
GTGACAGTTTGGCCTTGT
N-5FIP
(SEQ ID NO. 80)
TACTGCTGCCTGGAGTTGAATTCCTCTTCTCGTTCCTCATC
N-5BIP
(SEQ ID NO. 81)
GCTTTGCTGCTGCTTGACAGTGTTGTTGGCCTTTACCA
N-5LB
(SEQ ID NO. 82)
ATTGAACCAGCTTGAGAGCAAA
N-5LF-T7
(SEQ ID NO. 83)
gaaatTAATACGACTCACTATAGGGCTTGAACTGTTGCGACTACGT;
(c)
RP-F3
(SEQ ID NO. 85)
TTGATGAGCTGGAGCCA
RP-B3
(SEQ ID NO. 86)
CACCCTCAATGCAGAGTC
RP-FIP
(SEQ ID NO. 87)
GTGTGACCCTGAAGACTCGGTTTTAGCCACTGACTCGGATC
RP-BIP
(SEQ ID NO. 88)
CCTCCGTGATATGGCTCTTCGTTTTTTTCTTACATGGCTCTGGTC
RP-LF
(SEQ ID NO. 89)
ATGTGGATGGCTGAGTTGTT
RP-LB-T7
(SEQ ID NO. 90)
GAATTAATACGACTCACTATAGGGCATGCTGAGTACTGGACCTC;
and combinations thereof.

7. The composition of claim 6, wherein the RNA is isolated from a sample from a subject.

8. The composition of claim 7, wherein the subject is or is suspected to be or have been exposed to or infected with SARS-CoV-2.

9.-18. (canceled)

19. A method of detecting a SARS-CoV-2 target nucleic acid sequence, the method comprising:
contacting an RNA preparation with a CRISPR/Cas enzyme bound to a guide polynucleotide having a nucleotide sequence comprising a crRNA selected from the group consisting of: SEQ ID NO.: 77; SEQ ID NO.: 84; SEQ ID NO.: 91;
in the presence of rNTPs and a labeled nucleic acid reporter construct;
wherein cleavage of the labeled nucleic acid reporter construct by the CRISPR/Cas enzyme results in a detectable signal;
wherein detection of the detectable signal indicates presence of the SARS-CoV-2 target nucleic acid sequence in the RNA preparation.

20. A method of detecting a SARS-CoV-2 target nucleic acid sequence, the method comprising:
(i) obtaining a sample from a subject
(ii) isolating nucleic acid from the sample
(iii) amplifying target sequences by contacting the isolated nucleic acid with a primer set selected from the group consisting of:
(a):
orf1ab-F3
(SEQ ID NO. 72)
TGAAAATAGGACCTGAGCG
orf1ab-B3
(SEQ ID NO. 73)
ACACCTAGTCATGATTGCA
orf1ab-FIP
(SEQ ID NO. 74)
CCAATAGAATGATGCCAACAGGCGATAGACGTGCCACATGC
orf1ab-BIP
(SEQ ID NO. 75)
GATTGATGTTCAACAATGGGGTTTCATTACCATGGACTTGACAAT
orf1ab-LF-T7
(SEQ ID NO. 76)
gaaatTAATACGACTCACTATAGGGAAGTGTCTGAAGCAGTGGAAAA;
(b):
N-5F3
(SEQ ID NO. 78)
GCTTCTACGCAGAAGGGA
N-5B3
(SEQ ID NO. 79)
GTGACAGTTTGGCCTTGT
N-5FIP
(SEQ ID NO. 80)
TACTGCTGCCTGGAGTTGAATTCCTCTTCTCGTTCCTCATC
N-5BIP
(SEQ ID NO. 81)
GCTTTGCTGCTGCTTGACAGTGTTGTTGGCCTTTACCA
N-5LB
(SEQ ID NO. 82)
ATTGAACCAGCTTGAGAGCAAA
N-5LF-T7
(SEQ ID NO. 83)
gaaatTAATACGACTCACTATAGGGCTTGAACTGTTGCGACTACGT;
(c)
RP-F3
(SEQ ID NO. 85)
TTGATGAGCTGGAGCCA
RP-B3
(SEQ ID NO. 86)
CACCCTCAATGCAGAGTC
RP-FIP
(SEQ ID NO. 87)
GTGTGACCCTGAAGACTCGGTTTTAGCCACTGACTCGGATC
RP-BIP
(SEQ ID NO. 88)
CCTCCGTGATATGGCTCTTCGTTTTTTTCTTACATGGCTCTGGTC
RP-LF
(SEQ ID NO. 89)
ATGTGGATGGCTGAGTTGTT
RP-LB-T7
(SEQ ID NO. 90)
GAATTAATACGACTCACTATAGGGCATGCTGAGTACTGGACCTC;
and combinations thereof.
a reverse transcriptase;
a DNA polymerase;
nucleotides
(iv) contacting the amplified target sequences with:
a CRISPR/Cas enzyme;
a guide polynucleotide having a nucleotide sequence comprising a crRNA selected from the group consisting of: SEQ ID NO.: 77; SEQ ID NO.: 84; SEQ ID NO.: 91
rNTPs;
a labeled nucleic acid reporter construct;
wherein cleavage of the labeled nucleic acid reporter construct by the CRISPR/Cas enzyme results in a detectable signal;
wherein detection of the detectable signal indicates presence of the SARS-CoV-2 target nucleic acid sequence.

21. (canceled)

22. The method of claim 20, wherein the sample is a biological sample.

23. The method of claim 20, wherein the sample comprises nasal swab, nasopharyngeal swab, oropharyngeal swab, nasal aspirate, sputum, bronchoalveolar lavage, blood, serum, feces, and saliva.

24. The method of claim 20, wherein the step of isolating nucleic acid from the sample comprises isolating RNA from the sample.

25. The method of claim 20, wherein the labeled nucleic acid reporter construct is an RNA.

26. The method of claim 20, wherein the labeled nucleic acid reporter construct comprises a fluor/quencher pair.

27. The method of claim 20, wherein the detectable signal is fluorescence detection.

28. The composition of claim 20, wherein the CRISPR/Cas enzyme is a Type V CRISPR/Cas enzyme.

29. The composition of claim 20, wherein the CRISPR/Cas enzyme is a Type VI CRISPR/Cas enzyme.

30. The composition of claim 20, wherein the CRISPR/Cas enzyme is a thermostable CRISPR/Cas enzyme.

31. The composition of claim 20, wherein the CRISPR/Cas enzyme is a Cas13 CRISPR/Cas enzyme.

32. The composition of claim 20, wherein the CRISPR/Cas enzyme exhibits collateral RNase activity.

33.-41. (canceled)

42. A method of detecting a SARS-CoV-2 target nucleic acid sequence in a sample comprising:
contacting nucleic acid from the sample with:
a primer set having at least one primer selected from the group consisting of SEQ ID NOs.: 72-76, 78-83 92-429, 528-529 and JpS1-FIP AGGGACATAAGTCACATGCAAGAAGCTATCATCTTATGTCCTTCCCTC;
a type VI Cas;
at least one guide polynucleotide comprising a crRNA capable of binding the target nucleic acid sequence; and
a labeled nucleic acid reported construct, wherein the type VI Cas exhibits collateral RNase activity and cleaves the labeled nucleic acid reported construct once activated by presence of the target sequence;
detecting a signal from cleavage of labeled nucleic acid reported construct, thereby detecting the SARS-CoV-2 target nucleic acid sequence in the sample.

43. The method of claim 42, wherein the type VI Cas is Cas13.

44. The method of claim 42, further comprising obtaining a biological sample from a subject.

45. The method of claim 42, wherein the biological sample comprises nasal swab, nasopharyngeal swab, oropharyngeal swab, nasal aspirate, sputum, bronchoalveolar lavage, blood, feces, and saliva samples.

46. The method of claim 42, wherein the step of detecting a signal comprises detection of fluorescence, absorbance, spectrometry, lateral flow, migration, chemiluminescence, migration, electrochemical detection.

47.-60. (canceled)
